(19) United States
(12) Patent Application Publication
(10) Pub. No.: US 2015/0353961 A1
(43) Pub. Date: Dec. 10, 2015

(54) Designer Photoautotrophic and Hydrogenotrophic Production of Alcohols and Biodiesel

(71) Applicant: James Weifu Lee, Chesapeake, VA (US)

(72) Inventor: James Weifu Lee, Chesapeake, VA (US)

(21) Appl. No.: 14/832,476

(22) Filed: Aug. 21, 2015

Related U.S. Application Data
(63) Continuation-in-part of application No. 13/997,242, filed on Jun. 22, 2013.
Application No. 13/997,242 is a continuation-in-part of application No. 13/075,153, filed on Mar. 29, 2011, now Pat. No. 8,986,963.
Application No. 13/075,153 is a continuation-in-part of application No. 12/918,784, filed on Aug. 20, 2010, now Pat. No. 8,735,651.
(60) Provisional application No. 61/426,147, filed on Dec. 22, 2010.
(60) Provisional application No. 61/066,845, filed on Feb. 23, 2008.
(60) Provisional application No. 61/066,835, filed on Feb. 23, 2008.

(51) Int. Cl. C12P 7/16; C12P 7/04; C12P 7/06

(52) U.S. Cl. CPC C12P 7/16; C12P 7/06; C12P 7/04

(57) ABSTRACT

Designer Calvin-cycle-channeled and hydrogenotrophic biofuel-production pathways, the associated designer genes and designer transgenic organisms for autotrophic production of alcohols and biodiesel from carbon dioxide, hydrogen, and/or water are disclosed. The alcohols include methanol, ethanol, propanol, 1-butanol, 2-methyl-1-butanol, isobutanol, 3-methyl-1-butanol, 1-hexanol, 1-octanol, 1-pentanol, 1-heptanol, 3-methyl-1-pentanol, 4-methyl-1-hexanol, 5-methyl-1-heptanol, 4-methyl-1-pentanol, 5-methyl-1-hexanol, and 6-methyl-1-heptanol. The designer autotrophic organisms such as designer transgenic oxyphotobacteria and algae comprise designer Calvin-cycle-channeled and hydrogenotrophic pathway gene(s) and biosafety-guarding technology for enhanced autotrophic production of alcohols and biodiesel from carbon dioxide and water; wherein the designer transgenic cells in their mass liquid culture can inducibly self-flocculate for enhanced harvesting of their biomass upon the expression of the designer cell surface-linked positively charged polypeptides.

### CROSS-REFERENCE TO RELATED APPLICATIONS

[0001] This application is a continuation-in-part of co-pending U.S. patent application Ser. No. 13/997,242 that is the National Stage of International Application No. PCT/US2011/066090 filed on Dec. 20, 2011, which claims the benefit of U.S. Provisional Application No. 61/426,147 filed on Dec. 22, 2010 and U.S. patent application Ser. No. 13/075,153 filed on Mar. 29, 2011, which issued as U.S. Pat. No. 8,986,963 on Feb. 24, 2015 and is a continuation-in-part of U.S. patent application Ser. No. 12/918,784 filed on Aug. 20, 2010, which issued as U.S. Pat. No. 8,735,651 on May 27, 2014 and is the National Stage of International Application No. PCT/US2009/034801 filed on Feb. 21, 2009, which claims the benefit of U.S. Provisional Application No. 61/066,845 filed on Feb. 23, 2008, and U.S. Provisional Application No. 61/066,835 filed on Feb. 23, 2008. The entire disclosures of all of these applications are incorporated herein by reference.

### FIELD OF THE INVENTION

[0002] The present invention generally relates to biosafety-guarded biofuel energy production technology. More specifically, the present invention provides an autotrophic advanced-biofuels production methodology based on designer transgenic plants, such as transgenic algae, blue-green algae (cyanobacteria and oxychlorobacteria), plant cells or bacterial cells that are created to use the reducing power (NADPH) or Hydrogen (H₂), and energy (ATP) acquired from the photosynthetic and/or hydrogenotrophic process for autotrophic synthesis of alcohols and biodiesel from carbon dioxide (CO₂) and water (H₂O).

### REFERENCE TO SEQUENCE LISTING

[0003] The present invention contains references to amino acid sequences and/or nucleic acid sequences which have been submitted concurrently herewith as the sequence listing text file “JWL_{—}004_US3_SeqListingFull_ST25.txt” updated on Jul. 28, 2915 from “JWL_{—}004_PCT_SeqListingFull_ST25.txt” updated on Dec. 18, 2911 from the efile of “JWL_{—}004_US1_SeqListingFull_ST25.txt”, file size 429 KB, created on Mar. 29, 2011, in electronic format using the Electronic Filing System of the U.S. Patent and Trademark Office. The aforementioned sequence listing was prepared with PatentIn 3.5, which complies with all format requirements specified in World Intellectual Property Organization Standard (WIPO) ST.25 and the related United States (US) final rule, and is incorporated herein by reference in its entirety including pursuant to 37 C.F.R. §1.52(e)(5) where applicable. The amino acid sequences and/or nucleic acid sequences have also been submitted as the sequence listing .pdf file “JWL_{—}004_US3_SeqListingFull_ST25.pdf”, and the entire contents of all of these files are incorporated herein by reference.

### BACKGROUND OF THE INVENTION

[0004] Butanol, related higher alcohols and biodiesel can be used as a liquid fuel to run engines such as cars. Butanol can replace gasoline and the energy contents of the two fuels are nearly the same (110,000 Btu per gallon for butanol; 115,000 Btu per gallon for gasoline). Butanol has many superior properties as an alternative fuel when compared to ethanol as well. These include: 1) Butanol has higher energy content (110,000 Btu per gallon butanol) than ethanol (84,000 Btu per gallon ethanol); 2) Butanol is six times less “evaporative” than ethanol and 13.5 times less evaporative than gasoline, making it safer to use as an oxygenate and thereby eliminating the need for very special blends during the summer and winter seasons; 3) Butanol can be transported through the existing fuel infrastructure including the gasoline pipelines whereas ethanol must be shipped via rail, barge or truck; and 4) Butanol can be used as replacement for gasoline gallon for gallon e.g. 100% or any other percentage, whereas ethanol can only be used as an additive to gasoline up to about 85% (E-85) and then only after significant modification to the engine (while butanol can work as a 100% replacement fuel without having to modify the current car engine).

[0005] A significant potential market for butanol, related higher alcohols and biodiesel as a liquid fuel already exists in the current transportation and energy systems. Butanol is also used as an industrial solvent. In the United States, currently, butanol is manufactured primarily from petroleum. Historically (1900s-1950s), biobutanol was manufactured from corn and molasses in a fermentation process that also produced acetone and ethanol and was known as an ABE (acetone, butanol, ethanol) fermentation typically with certain butanol-producing bacteria such as Clostridium acetobutylicum and Clostridium beijerinckii. When the USA lost its low-cost sugar supply from Cuba around 1954, however, butanol production by fermentation declined mainly because the price of petroleum dropped below that of sugar. Recently, there is renewed R&D interest in producing butanol and/or ethanol from biomass such as corn starch using Clostridia- and/or yeast-fermentation process. However, similarly to the situation of “cornstarch ethanol production,” the “cornstarch butanol production” process also requires a number of energy-consuming steps including agricultural corn-crop cultivation, corn-grain harvesting, corn-grain starch processing, and starch-to-sugar-to-butanol fermentation. The “cornstarch butanol production” process could also probably cost nearly as much energy as the energy value of its product butanol. This is not surprising, understandably because the cornstarch that the current technology can use represents only a small fraction of the corn crop biomass that includes the corn stalks, leaves and roots. The cornstovers are commonly discarded in the agricultural fields where they slowly decompose back to CO₂, because they represent largely lignocellulosic biomass materials that the current biorefinery industry cannot efficiently use for ethanol or butanol production. There are research efforts in trying to make ethanol or butanol from lignocellulosic plant biomass materials—a concept called “cellulosic ethanol” or “cellulosic butanol”. However, plant biomass has evolved effective mechanisms for resisting assault on its cell-wall structural sugars from the microbial and animal kingdoms. This property underlies a natural recalcitrance, creating roadblocks to the cost-effective transformation of lignocellulosic biomass to fermentable sugars. Therefore, one of its problems known as the “lignocellulosic recalcitrance” represents a formidable technical barrier to the cost-effective conversion of plant biomass to fermentable sugars. That is, because of the recalcitrance problem, lignocellulosic biomasses (such as cornstover, switchgrass, and woody plant materials) could not be readily converted to fermentable sugars to make ethanol or butanol without certain pretreatment, which is often associated with high processing cost. Despite more than 50 years of R&D efforts in lignocellulosic biomass pretreatment and fermentative butanol-production processing, the problem of recalcitrant lignocellulosics still remains as a formidable technical barrier that has not yet been eliminated so far. Furthermore, the steps of lignocellulosic biomass cultivation, harvesting, pretreatment processing, and cellulose-to-sugar-to-butanol fermentation all cost energy. Therefore, any new technology that could bypass these bottleneck problems of the biomass technology would be useful.

[0006] Oxyphotobacteria (also known as blue-green algae including cyanobacteria and oxychlorobacteria) and algae (such as Chlamydomonas reinhardtii, Platymonas subcordiformis, Chlorella fusca, Dunaliella salina, Ankistrodesmus braunii, and Scenedesmus obliquus), which can perform photosynthetic assimilation of CO₂ with O₂ evolution from water in a liquid culture medium with a maximal theoretical solar-to-biomass energy conversion of about 10%, have tremendous potential to be a clean and renewable energy resource. However, the wild-type oxygenic photosynthetic green plants, such as blue-green algae and eukaryotic algae, do not possess the ability to produce butanol directly from CO₂ and H₂O. The wild-type photosynthesis uses the reducing power (NADPH) and energy (ATP) from the photosynthetic water splitting and proton gradient-coupled electron transport process through the algal thylakoid membrane system to reduce CO₂ into carbohydrates (CH₂O)ₙ such as starch with a series of enzymes collectively called the “Calvin cycle” at the stroma region in an algal or green-plant chloroplast. The net result of the wild-type photosynthetic process is the conversion of CO₂ and H₂O into carbohydrates (CH₂O)ₙ and O₂ using sunlight energy according to the following process reaction:

nCO₂+nH₂O→(CH₂O)n+nO₂ [1]

The carbohydrates (CH₂O)n are then further converted to all kinds of complicated cellular (biomass) materials including proteins, lipids, and cellulose and other cell-wall materials during cell metabolism and growth.

[0007] In certain alga such as Chlamydomonas reinhardtii, some of the organic reserves such as starch could be slowly metabolized to ethanol (but not to butanol) through a secondary fermentative metabolic pathway. The algal fermentative metabolic pathway is similar to the yeast-fermentation process, by which starch is breakdown to smaller sugars such as glucose that is, in turn, transformed into pyruvate by a glycolysis process. Pyruvate may then be converted to formate, acetate, and ethanol by a number of additional metabolic steps (Gfeller and Gibbs (1984) “Fermentative metabolism of Chlamydomonas reinhardtii,” Plant Physiol. 75:212-218). The efficiency of this secondary metabolic process is quite limited, probably because it could use only a small fraction of the limited organic reserve such as starch in an algal cell. Furthermore, the native algal secondary metabolic process could not produce any butanol. As mentioned above, butanol (and/or related higher alcohols) has many superior physical properties to serve as a replacement for gasoline as a fuel. Therefore, a new photobiological and/or hydrogenotrophic butanol (and/or related alcohols and biodiesel)-producing mechanism with a high energy conversion efficiency is needed.

[0008] International Application No. PCT/US2009/034801 discloses a set of methods on designer photosynthetic organisms (such as designer transgenic plant, plant cells, algae and oxyphotobacteria) for photobiological production of butanol from carbon dioxide (CO₂) and water (H₂O).

### SUMMARY OF THE INVENTION

[0009] The present invention discloses designer photosynthetic and/or hydrogenotrophic pathways, the associated designer genes and designer transgenic organisms for autotrophic production of alcohols and/or biodiesel that are selected from the group that consists of: methanol, ethanol, propanol, 1-butanol, 2-methyl-1-butanol, isobutanol, 3-methyl-1-butanol, 1-hexanol, 1-octanol, 1-pentanol, 1-heptanol, 3-methyl-1-pentanol, 4-methyl-1-hexanol, 5-methyl-1-heptanol, 4-methyl-1-pentanol, 5-methyl-1-hexanol, 6-methyl-1-heptanol, biodiesel, and combinations thereof.

[0010] The designer autotrophic organisms such as designer transgenic oxyphotobacteria and algae comprise designer photosynthetic and/or hydrogenotrophic pathway gene(s) and biosafety-guarding technology for autotrophic synthesis of methanol, ethanol, butanol and related higher alcohols from carbon dioxide and water, wherein the alcohol is simultaneously and/or subsequently utilized by a lipase in transesterification of triglyceride and fatty acids for production of biodiesel.

[0011] According to one of various embodiments, the transgenic autotrophic organism comprises a transgenic cell selected from the group consisting of blue-green algae (oxyphotobacteria including cyanobacteria and oxychlorobacteria), hydrogenotrophic bacteria, fermentative bacteria, methanogens, aquatic plants, plant cells, green algae, red algae, brown algae, diatoms, marine algae, freshwater algae, salt-tolerant algal strains, cold-tolerant algal strains, heat-tolerant algal strains, antenna-pigment-deficient mutants, butanol-tolerant algal strains, higher-alcohols-tolerant algal strains, butanol-tolerant oxyphotobacteria, butanol-tolerant hydrogenotrophic bacteria and methanogens, higher-alcohols-tolerant oxyphotobacteria, alcohol-tolerant hydrogenotrophic bacteria, alcohol-tolerant fermentative bacteria, biodiesel-tolerant algae, biodiesel-tolerant cyanobacteria, biodiesel-tolerant fermentative bacteria, and biodiesel-tolerant hydrogenotrophic bacteria, alcohol-tolerant and biodiesel-tolerant algae, alcohol-tolerant and biodiesel-tolerant cyanobacteria, alcohol-tolerant and biodiesel-tolerant fermentative bacteria, alcohol-tolerant and biodiesel-tolerant hydrogenotrophic bacteria, and alcohol-tolerant and biodiesel-tolerant methanogens, and combinations thereof.

[0012] According to another embodiment, a designer transgenic autotrophic organism comprises a set of designer genes that express a designer photoautotrophic methanol-biodiesel production pathway comprising: NADPH-dependent glyceraldehyde-3-phosphate dehydrogenase, NAD⁺-dependent glyceraldehyde-3-phosphate dehydrogenase, formate dehydrogenase, formaldehyde dehydrogenase, alcohol dehydrogenase, and lipase.

[0013] According to another embodiment, a designer transgenic autotrophic organism comprises a set of designer genes that express a designer hydrogenotrophic methanol-biodiesel production pathway comprising: NAD-reducing soluble hydrogenase, formate dehydrogenase, formaldehyde dehydrogenase, alcohol dehydrogenase, and lipase.

[0014] According to another embodiment, a designer transgenic autotrophic organism comprises a set of designer genes that express a designer photoautotrophic ethanol-biodiesel-production pathway comprising: NADPH-dependent glyceraldehyde-3-phosphate dehydrogenase, NAD⁺-dependent glyceraldehyde-3-phosphate dehydrogenase, phosphoglycerate mutase, enolase, pyruvate kinase, pyruvate decarboxylase, alcohol dehydrogenase, and lipase.

[0015] According to another embodiment, a designer transgenic autotrophic organism comprises a set of designer genes that express a designer photoautotrophic butanol-biodiesel-production pathway comprising: NAD⁺-dependent glyceraldehyde-3-phosphate dehydrogenase, phosphoglycerate mutase, enolase, pyruvate kinase, pyruvate-ferredoxin oxidoreductase, acetyl-CoA acetyltransferase, thiolase, 3-hydroxybutyryl-CoA dehydrogenase, crotonase, trans-enoyl-CoA reductase, butyryl-CoA dehydrogenase, butyraldehyde dehydrogenase, aldehyde/alcohol dehydrogenase (AdhE2), butanol dehydrogenase, and lipase.

[0016] According to another embodiment, a designer transgenic autotrophic organism comprises a set of designer genes that express a designer photoautotrophic butanol-biodiesel-production pathway comprising: NADPH-dependent glyceraldehyde-3-phosphate dehydrogenase, NAD-dependent glyceraldehyde-3-phosphate dehydrogenase, phosphoglycerate mutase, enolase, phosphoenolpyruvate carboxylase, aspartate aminotransferase, aspartokinase, aspartate-semialdehyde dehydrogenase, homoserine dehydrogenase, homoserine kinase, threonine synthase, threonine ammonia-lyase, 2-isopropylmalate synthase, isopropylmalate isomerase, 3-isopropylmalate dehydrogenase, 2-keto acid decarboxylase, NAD-dependent alcohol dehydrogenase, NADPH-dependent alcohol dehydrogenase, butanol dehydrogenase, and lipase.

[0017] According to another embodiment, a designer transgenic autotrophic organism comprises a set of designer genes that express a designer photoautotrophic isobutanol-biodiesel-production pathway comprising: NADPH-dependent glyceraldehyde-3-phosphate dehydrogenase, NAD-dependent glyceraldehyde-3-phosphate dehydrogenase, phosphoglycerate mutase, enolase, pyruvate kinase, acetolactate synthase, ketol-acid reductoisomerase, dihydroxy-acid dehydratase, 2-keto acid decarboxylase, NAD-dependent alcohol dehydrogenase, NADPH-dependent alcohol dehydrogenase, and lipase.

[0018] According to another embodiment, a designer transgenic autotrophic organism comprises a set of designer genes that express a designer photoautotrophic 3-methyl-1-butanol-biodiesel-production pathway comprising: NADPH-dependent glyceraldehyde-3-phosphate dehydrogenase, NAD-dependent glyceraldehyde-3-phosphate dehydrogenase, phosphoglycerate mutase, enolase, pyruvate kinase, acetolactate synthase, ketol-acid reductoisomerase, dihydroxy-acid dehydratase, 2-isopropylmalate synthase, 3-isopropylmalate dehydratase, 3-isopropylmalate dehydrogenase, 2-keto acid decarboxylase, NAD-dependent alcohol dehydrogenase, NADPH-dependent alcohol dehydrogenase, 3-methylbutanal reductase, and lipase.

[0019] According to another embodiment, a designer transgenic autotrophic organism comprises a set of designer genes that express a designer anaerobic hydrogenotrophic 1-butanol-biodiesel-production pathway comprising: energy converting hydrogenase, [NiFe]-hydrogenase, Coenzyme F₄₂₀-reducing hydrogenase, soluble hydrogenase, heterodissulfide reductase, formylmethanofuran dehydrogenase, formyl transferase, 10-methenyl-tetrahydromethanopterin cyclohydrolase, 10-methylene-H₄ methanopterin dehydrogenase, 10-methylene-H₄-methanopterin reductase, methyl-H₄-methanopterin: corrinoid iron-sulfur protein methyltransferase, corrinoid iron-sulfur protein, CO dehydrogenase/acetyl-CoA synthase, thiolase, 3-hydroxybutyryl-CoA dehydrogenase, crotonase, butyryl-CoA dehydrogenase, butyaldehyde dehydrogenase, butanol dehydrogenase, alcohol dehydrogenase, and lipase.

[0020] According to another embodiment, a designer transgenic autotrophic organism is made free of any antibiotic resistance genes for better biosafety by using nutrient-complementation selection with special authoxtrophs that are generated by deletion of an essential nutrient-gene selected from the group consisting of argininosuccinate lyase (arg7), nitrate reductase, ketol-acid reductoisomerase and dihydroxy-acid dehydratase.

[0021] According to another embodiment, a designer positively-charged polypeptides expressed on transgenic microbial cell surfaces are selected from the group consisting of polypeptides rich in lysine residuals, polypeptides rich in arginine residues, polypeptides rich in histidine residues, polypeptides rich in lysine and arginine residues, polypeptides rich in lysine and histidine residues, polypeptides rich in lysine and arginine and histidine residues, lipase-fused polylysine, polyamine-lipase-fused polylysine, lipase-fused positively-charged polypeptides, fluorescent protein-lipase-fused polylysine, and fluorescent protein-lipase-fused positively-charged polypeptides. Wherein the designer transgenic cells in their mass liquid culture inducibly self-flocculate for enhanced harvesting of their biomass upon the expression of the designer cell surface-linked positively charged polypeptides.

### BRIEF DESCRIPTION OF THE DRAWINGS

[0022] FIG. 1 presents designer butanol-production pathways branched from the Calvin cycle using the reducing power (NADPH) and energy (ATP) from the photosynthetic water splitting and proton gradient-coupled electron transport process to reduce carbon dioxide (CO₂) into butanol CH₃CH₂CH₂CH₂OH with a series of enzymatic reactions.

[0023] FIG. 2A presents a DNA construct for designer butanol-production-pathway gene(s).

[0024] FIG. 2B presents a DNA construct for NADPH/NADH-conversion designer gene for NADPH/NADH inter-conversion.

[0025] FIG. 2C presents a DNA construct for a designer iRNA starch/glycogen-synthesis inhibitor(s) gene.

[0026] FIG. 2D presents a DNA construct for a designer starch-degradation-glycolysis gene(s).

[0027] FIG. 2E presents a DNA construct of a designer butanol-production-pathway gene(s) for cytosolic expression.

[0028] FIG. 2F presents a DNA construct of a designer butanol-production-pathway gene(s) with two recombination sites for integrative genetic transformation in oxyphotobacteria.

[0029] FIG. 2G presents a DNA construct of a designer biosafety-control gene(s).

[0030] FIG. 2H presents a DNA construct of a designer proton-channel gene(s).

[0031] FIG. 3A illustrates a cell-division-controllable designer organism that contains two key functions: designer biosafety mechanism(s) and designer biofuel-production pathway(s).

[0032] FIG. 3B illustrates a cell-division-controllable designer organism for photobiological production of butanol (CH₃CH₂CH₂CH₂OH) from carbon dioxide (CO₂) and water (H₂O) with designer biosafety mechanism(s).

[0033] FIG. 3C illustrates a cell-division-controllable designer organism for biosafety-guarded photobiological production of other biofuels such as ethanol (CH₃CH₂OH) from carbon dioxide (CO₂) and water (H₂O).

[0034] FIG. 4 presents designer Calvin-cycle-channeled and photosynthetic NADPH-enhanced pathways using the reducing power (NADPH) and energy (ATP) from the photosynthetic water splitting and proton gradient-coupled electron transport process to reduce carbon dioxide (CO₂) into 1-butanol (CH₃CH₂CH₂CH₂OH) with a series of enzymatic reactions.

[0035] FIG. 5 presents designer Calvin-cycle-channeled and photosynthetic NADPH-enhanced pathways using NADPH and ATP from the photosynthetic water splitting and proton gradient-coupled electron transport process to reduce carbon dioxide (CO₂) into 2-methyl-1-butanol (CH₃CH₂CH(CH₃)CH₂OH) with a series of enzymatic reactions.

[0036] FIG. 6 presents designer Calvin-cycle-channeled and photosynthetic NADPH-enhanced pathways using NADPH and ATP from the photosynthetic water splitting and proton gradient-coupled electron transport process to reduce carbon dioxide (CO₂) into isobutanol ((CH₃)₂CHCH₂OH) and 3-methyl-1-butanol (CH₃CH(CH₃)CH₂CH₂OH) with a series of enzymatic reactions.

[0037] FIG. 7 presents designer Calvin-cycle-channeled and photosynthetic NADPH-enhanced pathways using NADPH and ATP from the photosynthetic water splitting and proton gradient-coupled electron transport process to reduce carbon dioxide (CO₂) into 1-hexanol (CH₃CH₂CH₂CH₂CH₂CH₂OH) and 1-octanol (CH₃CH₂CH₂CH₂CH₂CH₂CH₂CH₂OH) with a series of enzymatic reactions.

[0038] FIG. 8 presents designer Calvin-cycle-channeled and photosynthetic NADPH-enhanced pathways using NADPH and ATP from the photosynthetic water splitting and proton gradient-coupled electron transport process to reduce carbon dioxide (CO₂) into 1-pentanol (CH₃CH₂CH₂CH₂CH₂OH), 1-hexanol (CH₃CH₂CH₂CH₂CH₂CH₂OH), and 1-heptanol (CH₃CH₂CH₂CH₂CH₂CH₂CH₂OH) with a series of enzymatic reactions.

[0039] FIG. 9 presents designer Calvin-cycle-channeled and photosynthetic NADPH-enhanced pathways using NADPH and ATP from the photosynthetic water splitting and proton gradient-coupled electron transport process to reduce carbon dioxide (CO₂) into 3-methyl-1-pentanol (CH₃CH₂CH(CH₃)CH₂CH₂OH), 4-methyl-1-hexanol (CH₃CH₂CH(CH₃)CH₂CH₂CH₂OH), and 5-methyl-1-heptanol (CH₃CH₂CH(CH₃)CH₂CH₂CH₂CH₂OH) with a series of enzymatic reactions.

[0040] FIG. 10 presents designer Calvin-cycle-channeled and photosynthetic NADPH-enhanced pathways using NADPH and ATP from the photosynthetic water splitting and proton gradient-coupled electron transport process to reduce carbon dioxide (CO₂) into 4-methyl-1-pentanol (CH₃CH(CH₃)CH₂CH₂CH₂OH), 5-methyl-1-hexanol (CH₃CH(CH₃)CH₂CH₂CH₂CH₂OH), and 6-methyl-1-heptanol (CH₃CH(CH₃)CH₂CH₂CH₂CH₂CH₂OH) with a series of enzymatic reactions.

[0041] FIG. 11 illustrates a designer organism with designer oxygen-tolerant hydrogenases and Calvin-cycle-channeled biofuel-production pathway(s) for aerobic chemolithoautotrophic production of biofuels such as butanol (CH₃CH₂CH₂CH₂OH) from hydrogen (H₂), carbon dioxide (CO₂), and oxygen (O₂).

[0042] FIG. 12 illustrates a designer organism that comprises a designer anaerobic hydrogenotrophic system with reductive-acetyl-CoA biofuel-production pathway(s) for anaerobic chemolithotrophic production of 1-butanol (CH₃CH₂CH₂CH₂OH) from hydrogen (H₂) and carbon dioxide (CO₂).

[0043] FIG. 13 presents a designer reductive-acetyl-CoA biofuel-production pathway for anaerobic hydrogenotrophic production of 1-butanol (CH₃CH₂CH₂CH₂OH) from carbon dioxide (CO₂) with a series of enzymatic reactions.

[0044] FIG. 14 presents a designer ATP-required reductive-acetyl-CoA biofuel-production pathway for anaerobic hydrogenotrophic production of 1-butanol (CH₃CH₂CH₂CH₂OH) from carbon dioxide (CO₂) with a series of enzymatic reactions.

[0045] FIG. 15 illustrates a designer organism that comprises a designer methanogenic hydrogenotrophic system with reductive-acetyl-CoA biofuel-production pathway(s) for anaerobic chemolithotrophic production of both 1-butanol (CH₃CH₂CH₂CH₂OH) and methane (CH₄) from hydrogen (H₂) and carbon dioxide (CO₂).

[0046] FIG. 16 presents designer reductive-acetyl-CoA biofuel-production pathways for anaerobic hydrogenotrophic production of both 1-butanol (CH₃CH₂CH₂CH₂OH) and methane (CH₄) from carbon dioxide (CO₂) with a series of enzymatic reactions.

[0047] FIG. 17 presents designer ATP-required reductive-acetyl-CoA biofuel-production pathways for anaerobic hydrogenotrophic production of both 1-butanol (CH₃CH₂CH₂CH₂OH) and methane (CH₄) from carbon dioxide (CO₂) and with a series of enzymatic reactions.

[0048] FIG. 18 presents a designer autotrophic methanol-biodiesel production pathway with an NADPH/NADH conversion process.

[0049] FIG. 19 presents a designer hydrogenotrophic cell for autotrophic synthesis of alcohol and biodiesel from carbon dioxide (CO₂) and molecular hydrogen (H₂).

[0050] FIG. 20 presents a designer autotrophic cell such as a transgenic algal cell with lipase and positively-charged polypeptide such as polylysine expressed on cell surface for autotrophic (such as photosynthetic) production of alcohol and biodiesel from carbon dioxide (CO₂) and water (H₂O) and for enabling self-flocculation to enhance harvesting of cells from liquid culture.

### DETAILED DESCRIPTION OF THE INVENTION

[0051] The present invention is directed to an autotrophic methanol, ethanol, butanol and related high alcohols, and biodiesel production technology based on designer autotrophic organisms such as designer transgenic plants (e.g., algae and oxyphotobacteria), plant cells, or bacteria. In this context throughout this specification, a “higher alcohol” or “related higher alcohol” refers to an alcohol that comprises at least four carbon atoms, which includes both straight and branched alcohols such as 1-butanol and 2-methyl-1-butanol. Conversely, a “related alcohol” refers to an alcohol that comprises at least one carbon atom. The Calvin-cycle-channeled and photosynthetic-NADPH-enhanced pathways are constructed with designer enzymes expressed through use of designer genes in host photosynthetic organisms such as algae and oxyphotobacteria (including cyanobacteria and oxychlorobacteria) organisms for photobiological production of butanol and related higher alcohols. The said butanol and related alcohols are selected from the group consisting of: methanol, ethanol, 1-butanol, 2-methyl-1-butanol, isobutanol, 3-methyl-1-butanol, 1-hexanol, 1-octanol, 1-pentanol, 1-heptanol, 3-methyl-1-pentanol, 4-methyl-1-hexanol, 5-methyl-1-heptanol, 4-methyl-1-pentanol, 5-methyl-1-hexanol, and 6-methyl-1-heptanol. The designer plants and plant cells are created using genetic engineering techniques such that the endogenous photosynthesis regulation mechanism is tamed, and the reducing power (NADPH) and energy (ATP) acquired from the photosynthetic water splitting and proton gradient-coupled electron transport process can be used for immediate synthesis of alcohols, such as 1-butanol (CH₃CH₂CH₂CH₂OH) and 2-methyl-1-butanol (CH₃CH₂CH(CH₃)CH₂OH), from carbon dioxide (CO₂) and water (H₂O) according to the following generalized process reaction (where m, n, x and y are its molar coefficients) in accordance of the present invention:

m(CO₂)+n(H₂O)→x(alcohols)+y(O₂) [2]

The photobiological alcohols-production methods of the present invention completely eliminate the problem of recalcitrant lignocellulosics by bypassing the bottleneck problem of the biomass technology. As shown in FIG. 1, for example, the photosynthetic process in a designer organism effectively uses the reducing power (NADPH) and energy (ATP) from the photosynthetic water splitting and proton gradient-coupled electron transport process for immediate synthesis of butanol (CH₃CH₂CH₂CH₂OH) directly from carbon dioxide (CO₂) and water (H₂O) without being drained into the other pathway for synthesis of the undesirable lignocellulosic materials that are very hard and often inefficient for the biorefinery industry to use. This approach is also different from the existing “cornstarch butanol production” process. In accordance with this invention, butanol can be produced directly from carbon dioxide (CO₂) and water (H₂O) without having to go through many of the energy consuming steps that the cornstarch butanol-production process has to go through, including corn crop cultivation, corn-grain harvesting, corn-grain cornstarch processing, and starch-to-sugar-to-butanol fermentation. As a result, the photosynthetic butanol-production technology of the present invention is expected to have a much (more than 10-times) higher solar-to-butanol energy-conversion efficiency than the current technology. Assuming a 10% solar energy conversion efficiency for the proposed photosynthetic butanol production process, the maximal theoretical productivity (yield) could be about 72,700 kg of butanol per acre per year, which could support about 70 cars (per year per acre). Therefore, this invention could bring a significant capability to the society in helping to ensure energy security. The present invention could also help protect the Earth's environment from the dangerous accumulation of CO₂ in the atmosphere, because the present methods convert CO₂ directly into clean butanol energy.

[0052] A fundamental feature of the present methodology is utilizing a plant (e.g., an alga or oxyphotobacterium) or plant cells, introducing into the plant or plant cells nucleic acid molecules encoding for a set of enzymes that can act on an intermediate product of the Calvin cycle and convert the intermediate product into butanol as illustrated in FIG. 1, instead of making starch and other complicated cellular (biomass) materials as the end products by the wild-type photosynthetic pathway. Accordingly, the present invention provides, inter alia, methods for producing butanol and/or related alcohols based on a designer plant (such as a designer alga and a designer oxyphotobacterium), designer plant tissue, or designer plant cells, DNA constructs encoding genes of a designer butanol- and/or related higher alcohols-production pathway(s), as well as the designer algae, designer oxyphotobacteria (including designer cyanobacteria), designer fermentative bacteria, designer hydrogenotrophic bacteria, designer plants, designer plant tissues, and designer plant cells created. The various aspects of the present invention are described in further detail hereinbelow.

### Host Photosynthetic Organisms

[0053] According to the present invention, a designer organism or cell for the photosynthetic butanol and/or related higher alcohols production of the invention can be created utilizing as host, any plant (including alga and oxyphotobacterium), plant tissue, or plant cells that have a photosynthetic capability, i.e., an active photosynthetic apparatus and enzymatic pathway that captures light energy through photosynthesis, using this energy to convert inorganic substances into organic matter. Preferably, the host organism should have an adequate photosynthetic CO₂ fixation rate, for example, to support photosynthetic butanol (and/or related higher alcohols) production from CO₂ and H₂O at least about 1,450 kg butanol per acre per year, more preferably, 7,270 kg butanol per acre per year, or even more preferably, 72,700 kg butanol per acre per year.

[0054] In a preferred embodiment, an aquatic plant is utilized to create a designer plant. Aquatic plants, also called hydrophytic plants, are plants that live in or on aquatic environments, such as in water (including on or under the water surface) or permanently saturated soil. As used herein, aquatic plants include, for example, algae, blue-green algae (cyanobacteria and oxychlorobacteria), submersed aquatic herbs (Hydrilla verticillata, Elodea densa, Hippuris vulgaris, Aponogeton Boivinianus, Aponogeton Rigidifolius, Aponogeton Longiplumulosus, Didiplis Diandra, Vesicularia Dubyana, Hygrophilia Augustifolia, Micranthemum Umbrosum, Eichhornia Azurea, Saururus Cernuus, Cryptocoryne Lingua, Hydrotriche Hottoniiflora, Eustralis Stellata, Vallisneria Rubra, Hygrophila Salicifolia, Cyperus Helferi, Cryptocoryne Petchii, Vallisneria americana, Vallisneria Torta, Hydrotriche Hottoniiflora, Crassula Helmsii, Limnophila Sessiliflora, Potamogeton Perfoliatus, Rotala Wallichii, Cryptocoryne Becketii, Blyxa Aubertii, Hygrophila Difformmis), duckweeds (Spirodela polyrrhiza, Wolffia globosa, Lemna trisulca, Lemna gibba, Lemna minor, Landoltia punctata), water cabbage (Pistia stratiotes), buttercups (Ranunculus), water caltrop (Trapa natans and Trapa bicornis), water lily (Nymphaea lotus, Nymphaeaceae and Nelumbonaceae), water hyacinth (Eichhornia crassipes), Bolbitis heudelotii, Cabomba sp., seagrasses (Heteranthera Zosterifolia, Posidoniaceae, Zosteraceae, Hydrocharitaceae, and Cymodoceaceae). Butanol (and/or related higher alcohols) produced from an aquatic plant can diffuse into water, permitting normal growth of the plants and more robust production of butanol from the plants. Liquid cultures of aquatic plant tissues (including, but not limited to, multicellular algae) or cells (including, but not limited to, unicellular algae) are also highly preferred for use, since the butanol (and/or related higher alcohols) molecules produced from a designer butanol (and/or related higher alcohols) production pathway(s) can readily diffuse out of the cells or tissues into the liquid water medium, which can serve as a large pool to store the product butanol (and/or related higher alcohols) that can be subsequently harvested by filtration and/or distillation/evaporation techniques.

[0055] Although aquatic plants or cells are preferred host organisms for use in the methods of the present invention, tissue and cells of non-aquatic plants, which are photosynthetic and can be cultured in a liquid culture medium, can also be used to create designer tissue or cells for photosynthetic butanol (and/or related higher alcohols) production. For example, the following tissue or cells of non-aquatic plants can also be selected for use as a host organism in this invention: the photoautotrophic shoot tissue culture of wood apple tree Feronia limonia, the chlorophyllous callus-cultures of corn plant Zea mays, the green root cultures of Asteraceae and Solanaceae species, the tissue culture of sugarcane stalk parenchyma, the tissue culture of bryophyte Physcomitrella patens, the photosynthetic cell suspension cultures of soybean plant (Glycine max), the photoautotrophic and photomixotrophic culture of green Tobacco (Nicofiana tabacum L.) cells, the cell suspension culture of Gisekia pharnaceoides (a C₄ plant), the photosynthetic suspension cultured lines of Amaranthus powellii Wats., Datura innoxia Mill., Gossypium hirsutum L., and Nicotiana tabacum×Nicotiana glutinosa L. fusion hybrid.

[0056] By “liquid medium” is meant liquid water plus relatively small amounts of inorganic nutrients (e.g., N, P, K etc, commonly in their salt forms) for photoautotrophic cultures; and sometimes also including certain organic substrates (e.g., sucrose, glucose, or acetate) for photomixotrophic and/or photoheterotrophic cultures.

[0057] In an especially preferred embodiment, the plant utilized in the butanol (and/or related higher alcohols) production method of the present invention is an alga or a blue-green alga. The use of algae and/or blue-green algae has several advantages. They can be grown in an open pond at large amounts and low costs. Harvest and purification of butanol (and/or related higher alcohols) from the water phase is also easily accomplished by distillation/evaporation or membrane separation.

[0058] Algae suitable for use in the present invention include both unicellular algae and multi-unicellular algae. Multicellular algae that can be selected for use in this invention include, but are not limited to, seaweeds such as Ulva latissima (sea lettuce), Ascophyllum nodosum, Codium fragile, Fucus vesiculosus, Eucheuma denticulatum, Gracilaria gracilis, Hydrodictyon reticulatum, Laminaria japonica, Undaria pinntifida, Saccharina japonica, Porphyra yezoensis, and Porphyra tenera. Suitable algae can also be chosen from the following divisions of algae: green algae (Chlorophyta), red algae (Rhodophyta), brown algae (Phaeophyta), diatoms (Bacillariophyta), and blue-green algae (Oxyphotobacteria including Cyanophyta and Prochlorophytes). Suitable orders of green algae include Ulvales, Ulotrichales, Volvocales, Chlorellales, Schizogoniales, Oedogoniales, Zygnematales, Cladophorales, Siphonales, and Dasycladales. Suitable genera of Rhodophyta are Porphyra, Chondrus, Cyanidioschyzon, Porphyridium, Gracilaria, Kappaphycus, Gelidium and Agardhiella. Suitable genera of Phaeophyta are Laminaria, Undaria, Macrocystis, Sargassum and Dictyosiphon. Suitable genera of Cyanophyta (also known as Cyanobacteria) include (but not limited to) Phoridium, Synechocystis, Syncechococcus, Oscillatoria, and Anabaena. Suitable genera of Prochlorophytes (also known as oxychlorobacteria) include (but not limited to) Prochloron, Prochlorothrix, and Prochlorococcus. Suitable genera of Bacillariophyta are Cyclotella, Cylindrotheca, Navicula, Thalassiosira, and Phaeodactylum. Preferred species of algae for use in the present invention include Chlamydomonas reinhardtii, Platymonas subcordiformis, Chlorella fusca, Chlorella sorokiniana, Chlorella vulgaris, ‘Chlorella’ ellipsoidea, Chlorella spp., Dunaliella salina, Dunaliella viridis, Dunaliella bardowil, Haematococcus pluvialis; Parachlorella kessleri, Betaphycus gelatinum, Chondrus crispus, Cyanidioschyzon merolae, Cyanidium caldarium, Galdieria sulphuraria, Gelidiella acerosa, Gracilaria changii, Kappaphycus alvarezii, Porphyra miniata, Ostreococcus tauri, Porphyra yezoensis, Porphyridium sp., Palmaria palmata, Gracilaria spp., Isochrysis galbana, Kappaphycus spp., Laminaria japonica, Laminaria spp., Monostroma spp., Nannochloris bacillaris, Nannochloris sp., Nannochloropsis oculata, Porphyra spp., Porphyridium spp., Undaria pinnatifida, Ulva lactuca, Ulva spp., Undaria spp., Phaeodactylum Tricornutum, Navicula saprophila, Crypthecodinium cohnii, Cylindrotheca fusiformis, Cyclotella cryptica, Euglena gracilis, Amphidinium sp., Symbiodinium microadriaticum, Macrocystis pyrifera, Ankistrodesmus braunii, Ankistrodesmus convolutus, Ankistrodesmus falcatus, Ankistrodesmus stipitatus, Pavlova salina, Pavlova lutheri, Botryococcus braunii, Scenedesmus vacuolatus, Scenedesmus acutus, Scenedesmus rotundus, Scenedesmus dimorphus, Scenedesmus sp. Ki4, Scenedesmus sp. LU4, Scenedesmus quadricaudus, and Scenedesmus obliquus.

[0059] Preferred species of blue-green algae (oxyphotobacteria including cyanobacteria and oxychlorobacteria) for use in the present invention include Thermosynechococcus elongatus BP-1, Nostoc sp. PCC 7120, Synechococcus elongatus PCC 6301, Syncechococcus sp. strain PCC 7942, Syncechococcus sp. strain PCC 7002, Syncechocystis sp. strain PCC 6803, Prochlorococcus marinus MED4, Prochlorococcus marinus MIT 9313, Prochlorococcus marinus NATL1A, Prochlorococcus SS120, Spirulina platensis (Arthrospira platensis), Spirulina pacifica, Lyngbya majuscule, Anabaena sp., Synechocystis sp., Synechococcus elongates, Synechococcus (MC-A), Trichodesmium sp., Richelia intracellularis, Synechococcus WH7803, Synechococcus WH8102, Nostoc punctiforme, Syncechococcus sp. strain PCC 7943, Synechocyitis PCC 6714 phycocyanin-deficient mutant PD-1, Cyanothece strain 51142, Cyanothece sp. CCY0110, Oscillatoria limosa, Lyngbya majuscula, Symploca muscorum, Gloeobacter violaceus, Prochloron didemni, Prochlorothrix hollandica, Synechococcus (MC-A), Trichodesmium sp., Richelia intracellularis, Prochlorococcus marinus, Prochlorococcus SS120, Synechococcus WH8102, Lyngbya majuscula, Symploca muscorum, Synechococcus bigranulatus, cryophilic Oscillatoria sp., Phormidium sp., Nostoc sp.-1, Calothrix parietina, thermophilic Synechococcus bigranulatus, Synechococcus lividus, thermophilic Mastigocladus laminosus, Chlorogloeopsis fritschii PCC 6912, Synechococcus vulcanus, Synechococcus sp. strain MA4, Synechococcus sp. strain MA19, and Thermosynechococcus elongatus.

[0060] Proper selection of host photosynthetic organisms for their genetic backgrounds and certain special features is also beneficial. For example, a photosynthetic-butanol-producing designer alga created from cryophilic algae (psychrophiles) that can grow in snow and ice, and/or from cold-tolerant host strains such as Chlamydomonas cold strain CCMG1619, which has been characterized as capable of performing photosynthetic water splitting as cold as 4° C. (Lee, Blankinship and Greenbaum (1995), “Temperature effect on production of hydrogen and oxygen by Chlamydomonas cold strain CCMP1619 and wild type 137c,” Applied Biochemistry and Biotechnology 51/52:379-386), permits photobiological butanol production even in cold seasons or regions such as Canada. Meanwhile, a designer alga created from a thermophilic/thermotolerant photosynthetic organism such as thermophilic algae Cyanidium caldarium and Galdieria sulphuraria and/or thermophilic cyanobacteria (blue-green algae) such as Thermosynechococcus elongatus BP-1 and Synechococcus bigranulatus may permit the practice of this invention to be well extended into the hot seasons or areas such as Mexico and the Southwestern region of the United States including Nevada, California, Arizona, New Mexico and Texas, where the weather can often be hot. Furthermore, a photosynthetic-butanol-producing designer alga created from a marine alga, such as Platymonas subcordiformis, permits the practice of this invention using seawater, while the designer alga created from a freshwater alga such as Chlamydomonas reinhardtii can use freshwater. Additional optional features of a photosynthetic butanol (and/or related higher alcohols) producing designer alga include the benefits of reduced chlorophyll-antenna size, which has been demonstrated to provide higher photosynthetic productivity (Lee, Mets, and Greenbaum (2002). “Improvement of photosynthetic efficiency at high light intensity through reduction of chlorophyll antenna size,” Applied Biochemistry and Biotechnology, 98-100: 37-48) and butanol-tolerance (and/or related higher alcohols-tolerance) that allows for more robust and efficient photosynthetic production of butanol (and/or related higher alcohols) from CO₂ and H₂O. By use of a phycocyanin-deficient mutant of Synechocystis PCC 6714, it has been experimentally demonstrated that photoinhibition can be reduced also by reducing the content of light-harvesting pigments (Nakajima, Tsuzuki, and Ueda (1999) “Reduced photoinhibition of a phycocyanin-deficient mutant of Synechocystis PCC 6714”, Journal of Applied Phycology 10: 447-452). These optional features can be incorporated into a designer alga, for example, by use of a butanol-tolerant and/or chlorophyll antenna-deficient mutant (e.g., Chlamydomonas reinhardtii strain DS521) as a host organism, for gene transformation with the designer butanol-production-pathway genes. Therefore, in one of the various embodiments, a host organism is selected from the group consisting of aquatic plants, plant cells, green algae, red algae, brown algae, blue-green algae (oxyphotobacteria including cyanobacteria and oxychlorobacteria), hydrogenotrophic bacteria, fermentative bacteria, methanogens, diatoms, marine algae, freshwater algae, unicellular algae, multicellular algae, seaweeds, salt-tolerant algal strains, cold-tolerant algal strains, heat-tolerant algal strains, light-harvesting-antenna-pigment-deficient mutants, butanol-tolerant algal strains, higher-alcohols-tolerant algal strains, butanol-tolerant oxyphotobacteria, butanol-tolerant hydrogenotrophic bacteria and methanogens, higher-alcohols-tolerant oxyphotobacteria, alcohol-tolerant hydrogenotrophic bacteria, alcohol-tolerant fermentative bacteria, biodiesel-tolerant algae, biodiesel-tolerant cyanobacteria, biodiesel-tolerant fermentative bacteria, and biodiesel-tolerant hydrogenotrophic bacteria, alcohol-tolerant and biodiesel-tolerant algae, alcohol-tolerant and biodiesel-tolerant cyanobacteria, alcohol-tolerant and biodiesel-tolerant fermentative bacteria, alcohol-tolerant and biodiesel-tolerant hydrogenotrophic bacteria, and alcohol-tolerant and biodiesel-tolerant methanogens, and combinations thereof.

### Creating a Designer Butanol-Production Pathway in a Host

### Selecting Appropriate Designer Enzymes

[0061] One of the key features in the present invention is the creation of a designer butanol-production pathway to tame and work with the natural photosynthetic mechanisms to achieve the desirable synthesis of butanol directly from CO₂ and H₂O. The natural photosynthetic mechanisms include (1) the process of photosynthetic water splitting and proton gradient-coupled electron transport through the thylakoid membrane, which produces the reducing power (NADPH) and energy (ATP), and (2) the Calvin cycle, which reduces CO₂ by consumption of the reducing power (NADPH) and energy (ATP).

[0062] In accordance with the present invention, a series of enzymes are used to create a designer butanol-production pathway that takes an intermediate product of the Calvin cycle and converts the intermediate product into butanol as illustrated in FIG. 1. A “designer butanol-production-pathway enzyme” is hereby defined as an enzyme that serves as a catalyst for at least one of the steps in a designer butanol-production pathway. According to the present invention, a number of intermediate products of the Calvin cycle can be utilized to create designer butanol-production pathway(s); and the enzymes required for a designer butanol-production pathway are selected depending upon from which intermediate product of the Calvin cycle the designer butanol-production pathway branches off from the Calvin cycle.

[0063] In one example, a designer pathway is created that takes glyceraldehydes-3-phosphate and converts it into butanol by using, for example, a set of enzymes consisting of, as shown with the numerical labels 01-12 in FIG. 1, glyceraldehyde-3-phosphate dehydrogenase 01, phosphoglycerate kinase 02, phosphoglycerate mutase 03, enolase 04, pyruvate kinase 05, pyruvate-ferredoxin oxidoreductase 06, thiolase (or acetyl-CoA acetyltransferase) 07, 3-hydroxybutyryl-CoA dehydrogenase 08, crotonase 09, butyryl-CoA dehydrogenase (or trans-enoyl-CoA reductase) 10, butyraldehyde dehydrogenase (or aldehyde/alcohol dehydrogenase (AdhE2)) 11, and butanol dehydrogenase 12. In this glyceraldehydes-3-phosphate-branched designer pathway, for conversion of two molecules of glyceraldehyde-3-phosphate to butanol, two NADH molecules are generated from NAD⁺ at the step from glyceraldehyde-3-phosphate to 1,3-diphosphoglycerate catalyzed by glyceraldehyde-3-phosphate dehydrogenase 01; meanwhile two molecules of NADH are converted to NAD⁺: one at the step catalyzed by 3-hydroxybutyryl-CoA dehydrogenase 08 in reducing acetoacetyl-CoA to 3-hydroxybutyryl-CoA and another at the step catalyzed by butyryl-CoA dehydrogenase 10 in reducing crotonyl-CoA to butyryl-CoA. Consequently, in this glyceraldehydes-3-phosphate-branched designer pathway (01-12), the number of NADH molecules consumed is balanced with the number of NADH molecules generated. Furthermore, both the pathway step catalyzed by butyraldehyde dehydrogenase 11 (in reducing butyryl-CoA to butyraldehyde) and the terminal step catalyzed by butanol dehydrogenase 12 (in reducing butyraldehyde to butanol) can use NADPH, which can be regenerated by the photosynthetic water splitting and proton gradient-coupled electron transport process. Therefore, this glyceraldehydes-3-phosphate-branched designer butanol-production pathway can operate continuously.

[0064] In another example, a designer pathway is created that takes the intermediate product, 3-phosphoglycerate, and converts it into butanol by using, for example, a set of enzymes consisting of (as shown with the numerical labels 03-12 in FIG. 1) phosphoglycerate mutase 03, enolase 04, pyruvate kinase 05, pyruvate-ferredoxin oxidoreductase 06, thiolase (or acetyl-CoA acetyltransferase) 07, 3-hydroxybutyryl-CoA dehydrogenase 08, crotonase 09, butyryl-CoA dehydrogenase (or trans-enoyl-CoA reductase) 10, butyraldehyde dehydrogenase (or aldehyde/alcohol dehydrogenase (AdhE2)) 11, and butanol dehydrogenase 12. It is worthwhile to note that the last ten enzymes (03-12) of the glyceraldehydes-3-phosphate-branched designer butanol-producing pathway (01-12) are identical with those utilized in the 3-phosphoglycerate-branched designer pathway (03-12). In other words, the designer enzymes (01-12) of the glyceraldehydes-3-phosphate-branched pathway permit butanol production from both the point of 3-phosphoglycerate and the point of glyceraldehydes-3-phosphate in the Calvin cycle. These two pathways, however, have different characteristics. Unlike the glyceraldehyde-3-phosphate-branched butanol-production pathway, the 3-phosphoglycerate-branched pathway which consists of the activities of only ten enzymes (03-12) could not itself generate any NADH that is required for use at two places: one at the step catalyzed by 3-hydroxybutyryl-CoA dehydrogenase 08 in reducing acetoacetyl-CoA to 3-hydroxybutyryl-CoA, and another at the step catalyzed by butyryl-CoA dehydrogenase 10 in reducing crotonyl-CoA to butyryl-CoA. That is, if (or when) a 3-hydroxybutyryl-CoA dehydrogenase and/or a butyryl-CoA dehydrogenase that can use strictly only NADH but not NADPH is employed, it would require a supply of NADH for the 3-phosphoglycerate-branched pathway (03-12) to operate. Consequently, in order for the 3-phosphoglycerate-branched butanol-production pathway to operate, it is important to use a 3-hydroxybutyryl-CoA dehydrogenase 08 and a butyryl-CoA dehydrogenase 10 that can use NADPH which can be supplied by the photo-driven electron transport process. Therefore, it is a preferred practice to use a 3-hydroxybutyryl-CoA dehydrogenase and a butyryl-CoA dehydrogenase that can use NADPH or both NADPH and NADH (i.e., NAD(P)H) for this 3-phosphoglycerate-branched designer butanol-production pathway (03-12 in FIG. 1). Alternatively, when a 3-hydroxybutyryl-CoA dehydrogenase and a butyryl-CoA dehydrogenase that can use only NADH are employed, it is preferably here to use an additional embodiment that can confer an NADPH/NADH conversion mechanism (to supply NADH by converting NADPH to NADH, see more detail later in the text) in the designer organism to facilitate photosynthetic production of butanol through the 3-phosphoglycerate-branched designer pathway.

[0065] In still another example, a designer pathway is created that takes fructose-1,6-diphosphate and converts it into butanol by using, as shown with the numerical labels 20-33 in FIG. 1, a set of enzymes consisting of aldolase 20, triose phosphate isomerase 21, glyceraldehyde-3-phosphate dehydrogenase 22, phosphoglycerate kinase 23, phosphoglycerate mutase 24, enolase 25, pyruvate kinase 26, pyruvate-NADP⁺ oxidoreductase (or pyruvate-ferredoxin oxidoreductase) 27, thiolase 28, 3-hydroxybutyryl-CoA dehydrogenase 29, crotonase 30, butyryl-CoA dehydrogenase 31, butyraldehyde dehydrogenase 32, and butanol dehydrogenase 33, with aldolase 20 and triose phosphate isomerase 21 being the only two additional enzymes relative to the glyceraldehydes-3-phosphate-branched designer pathway. The use of a pyruvate-NADP⁺ oxidoreductase 27 (instead of pyruvate-ferredoxin oxidoreductase) in catalyzing the conversion of a pyruvate molecule to acetyl-CoA enables production of an NADPH, which can be used in some other steps of the butanol-production pathway. The addition of yet one more enzyme in the designer organism, phosphofructose kinase 19, permits the creation of another designer pathway which branches off from the point of fructose-6-phosphate of the Calvin cycle for the production of butanol. Like the glyceraldehyde-3-phosphate-branched butanol-production pathway, both the fructose-1,6-diphosphate-branched pathway (20-33) and the fructose-6-phosphate-branched pathway (19-33) can themselves generate NADH for use in the pathway at the step catalyzed by 3-hydroxybutyryl-CoA dehydrogenase 29 to reduce acetoacetyl-CoA to 3-hydroxybutyryl-CoA and at the step catalyzed by butyryl-CoA dehydrogenase 31 to reduce crotonyl-CoA to butyryl-CoA. In each of these designer butanol-production pathways, the numbers of NADH molecules consumed are balanced with the numbers of NADH molecules generated; and both the butyraldehyde dehydrogenase 32 (catalyzing the step in reducing butyryl-CoA to butyraldehyde) and the butanol dehydrogenase 33 (catalyzing the terminal step in reducing butyraldehyde to butanol) can all use NADPH, which can be regenerated by the photosynthetic water splitting and proton gradient-coupled electron transport process. Therefore, these designer butanol-production pathways can operate continuously.

[0066] Table 1 lists examples of the enzymes including those identified above for construction of the designer butanol-production pathways. Throughout this specification, when reference is made to an enzyme, such as, for example, any of the enzymes listed in Table 1, it includes their isozymes, functional analogs, and designer modified enzymes and combinations thereof. These enzymes can be selected for use in construction of the designer butanol-production pathways (such as those illustrated in FIG. 1). The “isozymes or functional analogs” refer to certain enzymes that have the same catalytic function but may or may not have exactly the same protein structures. The most essential feature of an enzyme is its active site that catalyzes the enzymatic reaction. Therefore, certain enzyme-protein fragment(s) or subunit(s) that contains such an active catalytic site may also be selected for use in this invention. For various reasons, some of the natural enzymes contain not only the essential catalytic structure but also other structure components that may or may not be desirable for a given application. With techniques of bioinformatics-assisted molecular designing, it is possible to select the essential catalytic structure(s) for use in construction of a designer DNA construct encoding a desirable designer enzyme. Therefore, in one of the various embodiments, a designer enzyme gene is created by artificial synthesis of a DNA construct according to bioinformatics-assisted molecular sequence design. With the computer-assisted synthetic biology approach, any DNA sequence (thus its protein structure) of a designer enzyme may be selectively modified to achieve more desirable results by design. Therefore, the terms “designer modified sequences” and “designer modified enzymes” are hereby defined as the DNA sequences and the enzyme proteins that are modified with bioinformatics-assisted molecular design. For example, when a DNA construct for a designer chloroplast-targeted enzyme is designed from the sequence of a mitochondrial enzyme, it is a preferred practice to modify some of the protein structures, for example, by selectively cutting out certain structure component(s) such as its mitochondrial transit-peptide sequence that is not suitable for the given application, and/or by adding certain peptide structures such as an exogenous chloroplast transit-peptide sequence (e.g., a 135-bp Rubisco small-subunit transit peptide (RbcS2)) that is needed to confer the ability in the chloroplast-targeted insertion of the designer protein. Therefore, one of the various embodiments flexibly employs the enzymes, their isozymes, functional analogs, designer modified enzymes, and/or the combinations thereof in construction of the designer butanol-production pathway(s).

[0067] As shown in Table 1, many genes of the enzymes identified above have been cloned and/or sequenced from various organisms. Both genomic DNA and/or mRNA sequence data can be used in designing and synthesizing the designer DNA constructs for transformation of a host alga, oxyphotobacterium, plant, plant tissue or cells to create a designer organism for photobiological butanol production (FIG. 1). However, because of possible variations often associated with various source organisms and cellular compartments with respect to a specific host organism and its chloroplast/thylakoid environment where the butanol-production pathway(s) is designed to work with the Calvin cycle, certain molecular engineering art work in DNA construct design including codon-usage optimization and sequence modification is often necessary for a designer DNA construct (FIG. 2) to work well. For example, in creating a butanol-producing designer eukaryotic alga, if the source sequences are from cytosolic enzymes (sequences), a functional chloroplast-targeting sequence may be added to provide the capability for a designer unclear gene-encoded enzyme to insert into a host chloroplast to confer its function for a designer butanol-production pathway. Furthermore, to provide the switchability for a designer butanol-production pathway, it is also important to include a functional inducible promoter sequence such as the promoter of a hydrogenase (Hyd1) or nitrate reductase (Nia1) gene, or nitrite reductase (nirA) gene in certain designer DNA construct(s) as illustrated in FIG. 2A to control the expression of designer gene(s). In addition, as mentioned before, certain functional derivatives or fragments of these enzymes (sequences), chloroplast-targeting transit peptide sequences, and inducible promoter sequences can also be selected for use in full, in part or in combinations thereof, to create the designer organisms according to various embodiments of this invention. The arts in creating and using the designer organisms are further described hereinbelow.

### Targeting the Designer Enzymes to the Stroma Region of Chloroplasts

[0068] Some of the designer enzymes discussed above, such as, pyruvate-ferredoxin oxidoreductase, thiolase, 3-hydroxybutyryl-CoA dehydrogenase, crotonase, butyryl-CoA dehydrogenase, butyraldehyde dehydrogenase, and butanol dehydrogenase are known to function in certain special bacteria such as Clostridium; but wild-type plant chloroplasts generally do not possess these enzymes to function with the Calvin cycle. Therefore, in one of the various embodiments in creating a butanol-producing eukaryotic designer organism, designer nucleic acids encoding for these enzymes are expressed in the chloroplast(s) of a host cell. This can be accomplished by delivery of designer butanol-production-pathway gene(s) into the chloroplast genome of the eukaryotic host cell typically using a genegun. In certain extent, the molecular genetics of chloroplasts are similar to that of cyanobacteria. After being delivered into the chloroplast, a designer DNA construct that contains a pair of proper recombination sites as illustrated in FIG. 2F can be incorporated into the chloroplast genome through a natural process of homologous DNA double recombination.

[0069] In another embodiment, nucleic acids encoding for these enzymes are genetically engineered such that the enzymes expressed are inserted into the chloroplasts to operate with the Calvin cycle there. Depending on the genetic background of a particular host organism, some of the designer enzymes discussed above such as phosphoglycerate mutase and enolase may exist at some background levels in its native form in a wild-type chloroplast. For various reasons including often the lack of their controllability, however, some of the chloroplast background enzymes may or may not be sufficient to serve as a significant part of the designer butanol-production pathway(s). Furthermore, a number of useful inducible promoters happen to function in the nuclear genome. For example, both the hydrogenase (Hyd1) promoter and the nitrate reductase (Nia1) promoter that can be used to control the expression of the designer butanol-production pathways are located in the nuclear genome of Chlamydomonas reinhardtii, of which the genome has recently been sequenced. Therefore, in one of the various embodiments, it is preferred to use nuclear-genome-encodable designer genes to confer a switchable butanol-production pathway. Consequently, nucleic acids encoding for these enzymes also need to be genetically engineered with proper sequence modification such that the enzymes are controllably expressed and are inserted into the chloroplasts to create a designer butanol-production pathway.

[0070] According to one of the various embodiments, it is best to express the designer butanol-producing-pathway enzymes only into chloroplasts (at the stroma region), exactly where the action of the enzymes is needed to enable photosynthetic production of butanol. If expressed without a chloroplast-targeted insertion mechanism, the enzymes would just stay in the cytosol and not be able to directly interact with the Calvin cycle for butanol production. Therefore, in addition to the obvious distinctive features in pathway designs and associated approaches, another significant distinction is that one of the various embodiments innovatively employs a chloroplast-targeted mechanism for genetic insertion of many designer butanol-production-pathway enzymes into chloroplast to directly interact with the Calvin cycle for photobiological butanol production.

[0071] With a chloroplast stroma-targeted mechanism, the cells will not only be able to produce butanol but also to grow and regenerate themselves when they are returned to certain conditions under which the designer pathway is turned off, such as under aerobic conditions when designer hydrogenase promoter-controlled butanol-production-pathway genes are used. Designer algae, plants, or plant cells that contain normal mitochondria should be able to use the reducing power (NADH) from organic reserves (and/or some exogenous organic substrate such as acetate or sugar) to power the cells immediately after returning to aerobic conditions. Consequently, when the designer algae, plants, or plant cells are returned to aerobic conditions after use under anaerobic conditions for photosynthetic butanol production, the cells will stop making the butanol-producing-pathway enzymes and start to restore the normal photoautotrophic capability by synthesizing new and functional chloroplasts. Therefore, it is possible to use such genetically engineered designer alga/plant organisms for repeated cycles of photoautotrophic growth under normal aerobic conditions and efficient production of butanol directly from CO₂ and H₂O under certain specific designer butanol-producing conditions such as under anaerobic conditions and/or in the presence of nitrate when a Nia1 promoter-controlled butanol-production pathway is used.

[0072] The targeted insertion of designer butanol-production-pathway enzymes can be accomplished through use of a DNA sequence that encodes for a stroma “signal” peptide. A stroma-protein signal (transit) peptide directs the transport and insertion of a newly synthesized protein into stroma. In accordance with one of the various embodiments, a specific targeting DNA sequence is preferably placed in between the promoter and a designer butanol-production-pathway enzyme sequence, as shown in a designer DNA construct (FIG. 2A). This targeting sequence encodes for a signal (transit) peptide that is synthesized as part of the apoprotein of an enzyme in the cytosol. The transit peptide guides the insertion of an apoprotein of a designer butanol-production-pathway enzyme from cytosol into the chloroplast. After the apoprotein is inserted into the chloroplast, the transit peptide is cleaved off from the apoprotein, which then becomes an active enzyme.

[0073] A number of transit peptide sequences are suitable for use for the targeted insertion of the designer butanol-production-pathway enzymes into chloroplast, including but not limited to the transit peptide sequences of: the hydrogenase apoproteins (such as HydA1 (Hyd1) and HydA2, GenBank accession number AJ308413, AF289201, AY090770), ferredoxin apoprotein (Frx1, accession numbers L10349, P07839), thioredoxin m apoprotein (Trx2, X62335), glutamine synthase apoprotein (Gs2, Q42689), LhcII apoproteins (ABO51210, AB051208, AB051205), PSII-T apoprotein (PsbT), PSII-S apoprotein (PsbS), PSII-W apoprotein (PsbW), CF₀CF₁ subunit-γ apoprotein (AtpC), CF₀CF₁ subunit-δ apoprotein (AtpD, U41442), CFoCF₁ subunit-II apoprotein (AtpG), photosystem I (PSI) apoproteins (such as, of genes PsaD, PsaE, PsaF, PsaG, PsaH, and PsaK), Rubisco SSU apoproteins (such as RbcS2, X04472). Throughout this specification, when reference is made to a transit peptide sequence, such as, for example, any of the transit peptide sequence described above, it includes their functional analogs, modified designer sequences, and combinations thereof. A “functional analog” or “modified designer sequence” in this context refers to a peptide sequence derived or modified (by, e.g., conservative substitution, moderate deletion or addition of amino acids, or modification of side chains of amino acids) based on a native transit peptide sequence, such as those identified above, that has the same function as the native transit peptide sequence, i.e., effecting targeted insertion of a desired enzyme.

[0074] In certain specific embodiments, the following transit peptide sequences are used to guide the insertion of the designer butanol-production-pathway enzymes into the stroma region of the chloroplast: the Hyd1 transit peptide (having the amino acid sequence: msalvlkpca aysirgsscr arqvaprapl aastvrvala tleaparrlg nvacaa (SEQ ID NO: 54)), the RbcS2 transit peptides (having the amino acid sequence: maaviakssv saavarpars svrpmaalkp avkaapvaap aqanq (SEQ ID NO: 55)), ferredoxin transit peptide (having the amino acid sequence: mamamrs (SEQ ID NO: 56)), the CF₀CF₁ subunit-6 transit peptide (having the amino acid sequence: mlaaksiagp rafkasavra apkagrrtvv vma (SEQ ID NO: 57)), their analogs, functional derivatives, designer sequences, and combinations thereof.

### Use of a Genetic Switch to Control the Expression of a Designer Butanol-Producing Pathway.

[0075] Another key feature of the invention is the application of a genetic switch to control the expression of the designer butanol-producing pathway(s), as illustrated in FIG. 1. This switchability is accomplished through the use of an externally inducible promoter so that the designer transgenes are inducibly expressed under certain specific inducing conditions. Preferably, the promoter employed to control the expression of designer genes in a host is originated from the host itself or a closely related organism. The activities and inducibility of a promoter in a host cell can be tested by placing the promoter in front of a reporting gene, introducing this reporter construct into the host tissue or cells by any of the known DNA delivery techniques, and assessing the expression of the reporter gene.

[0076] In a preferred embodiment, the inducible promoter used to control the expression of designer genes is a promoter that is inducible by anaerobiosis, i.e., active under anaerobic conditions but inactive under aerobic conditions. A designer alga/plant organism can perform autotrophic photosynthesis using CO₂ as the carbon source under aerobic conditions, and when the designer organism culture is grown and ready for photosynthetic butanol production, anaerobic conditions will be applied to turn on the promoter and the designer genes that encode a designer butanol-production pathway(s).

[0077] A number of promoters that become active under anaerobic conditions are suitable for use in the present invention. For example, the promoters of the hydrogenase genes (HydA1 (Hyd1) and HydA2, GenBank accession number: AJ308413, AF289201, AY090770) of Chlamydomonas reinhardtii, which is active under anaerobic conditions but inactive under aerobic conditions, can be used as an effective genetic switch to control the expression of the designer genes in a host alga, such as Chlamydomonas reinhardtii. In fact, Chlamydomonas cells contain several nuclear genes that are coordinately induced under anaerobic conditions. These include the hydrogenase structural gene itself (Hyd1), the Cyc6 gene encoding the apoprotein of Cytochrome C₆, and the Cpx1 gene encoding coprogen oxidase. The regulatory regions for the latter two have been well characterized, and a region of about 100 bp proves sufficient to confer regulation by anaerobiosis in synthetic gene constructs (Quinn, Barraco, Ericksson and Merchant (2000). “Coordinate copper- and oxygen-responsive Cyc6 and Cpx1 expression in Chlamydomonas is mediated by the same element.” J Biol Chem 275: 6080-6089). Although the above inducible algal promoters may be suitable for use in other plant hosts, especially in plants closely related to algae, the promoters of the homologous genes from these other plants, including higher plants, can be obtained and employed to control the expression of designer genes in those plants.

[0078] In another embodiment, the inducible promoter used in the present invention is an algal nitrate reductase (Nia1) promoter, which is inducible by growth in a medium containing nitrate and repressed in a nitrate-deficient but ammonium-containing medium (Loppes and Radoux (2002) “Two short regions of the promoter are essential for activation and repression of the nitrate reductase gene in Chlamydomonas reinhardtii,” Mol Genet Genomics 268: 42-48). Therefore, the Nia1 (gene accession number AF203033) promoter can be selected for use to control the expression of the designer genes in an alga according to the concentration levels of nitrate and ammonium in a culture medium. Additional inducible promoters that can also be selected for use in the present invention include, for example, the heat-shock protein promoter HSP70A (accession number: DQ059999, AY456093, M98823; Schroda, Blocker, Beek (2000) The HSP70A promoter as a tool for the improved expression of transgenes in Chlamydomonas. Plant Journal 21:121-131), the promoter of CabII-1 gene (accession number M24072), the promoter of Ca1 gene (accession number P20507), and the promoter of Ca2 gene (accession number P24258).

[0079] In the case of blue-green algae (oxyphotobacteria including cyanobacteria and oxychlorobacteria), there are also a number of inducible promoters that can be selected for use in the present invention. For example, the promoters of the anaerobic-responsive bidirectional hydrogenase hox genes of Nostoc sp. PCC 7120 (GenBank: BA000019), Prochlorothrix hollandica (GenBank: U88400; hoxUYH operon promoter), Synechocystis sp. strain PCC 6803 (CyanoBase: sll1220 and sll1223), Synechococcus elongatus PCC 6301 (CyanoBase: syc1235_c), Arthrospira platensis (GenBank: ABC26906), Cyanothece sp. CCY0110 (GenBank: ZP_{—}01727419) and Synechococcus sp. PCC 7002 (GenBank: AANO3566), which are active under anaerobic conditions but inactive under aerobic conditions (Sjoholm, Oliveira, and Lindblad (2007) “Transcription and regulation of the bidirectional hydrogenase in the Cyanobacterium Nostoc sp. strain PCC 7120,” Applied and Environmental Microbiology, 73(17): 5435-5446), can be used as an effective genetic switch to control the expression of the designer genes in a host oxyphotobacterium, such as Nostoc sp. PCC 7120, Synechocystis sp. strain PCC 6803, Synechococcus elongatus PCC 6301, Cyanothece sp. CCY0110, Arthrospira platensis, or Synechococcus sp. PCC 7002.

[0080] In another embodiment in creating switchable butanol-production designer organisms such as switchable designer oxyphotobacteria, the inducible promoter selected for use is a nitrite reductase (nirA) promoter, which is inducible by growth in a medium containing nitrate and repressed in a nitrate-deficient but ammonium-containing medium (Qi, Hao, Ng, Slater, Baszis, Weiss, and Valentin (2005) “Application of the Synechococcus nirA promoter to establish an inducible expression system for engineering the Synechocystis tocopherol pathway,” Applied and Environmental Microbiology, 71(10): 5678-5684; Maeda, Kawaguchi, Ohe, and Omata (1998) “cis-Acting sequences required for NtcB-dependent, nitrite-responsive positive regulation of the nitrate assimilation operon in the Cyanobacterium Synechococcus sp. strain PCC 7942,” Journal of Bacteriology, 180(16):4080-4088). Therefore, the nirA promoter sequences can be selected for use to control the expression of the designer genes in a number of oxyphotobacteria according to the concentration levels of nitrate and ammonium in a culture medium. The nirA promoter sequences that can be selected and modified for use include (but not limited to) the nirA promoters of the following oxyphotobacteria: Synechococcus elongatus PCC 6301 (GenBank: AP008231, region 355890-255950), Synechococcus sp. (GenBank: X67680.1, D16303.1, D12723.1, and D00677), Synechocystis sp. PCC 6803 (GenBank: NP_{—}442378, BA000022, AB001339, D63999-D64006, D90899-D90917), Anabaena sp. (GenBank: X99708.1), Nostoc sp. PCC 7120 (GenBank: BA000019.2 and AJ319648), Plectonema boryanum (GenBank: D31732.1), Synechococcus elongatus PCC 7942 (GenBank: P39661, CP000100.1), Thermosynechococcus elongatus BP-1 (GenBank: BAC08901, NP_{—}682139), Phormidium laminosum (GenBank: CAA79655, Q51879), Mastigocladus laminosus (GenBank: ABD49353, ABD49351, ABD49349, ABD49347), Anabaena variabilis ATCC 29413 (GenBank: YP_{—}325032), Prochlorococcus marinus str. MIT 9303 (GenBank: YP_{—}001018981), Synechococcus sp. WH 8103 (GenBank: AAC17122), Synechococcus sp. WH 7805 (GenBank: ZP_{—}01124915), and Cyanothece sp. CCY0110 (GenBank: ZP 01727861).

[0081] In yet another embodiment, an inducible promoter selected for use is the light- and heat-responsive chaperone gene groE promoter, which can be induced by heat and/or light [Kojima and Nakamoto (2007) “A novel light- and heat-responsive regulation of the groE transcription in the absence of HrcA or CIRCE in cyanobacteria,” FEBS Letters 581:1871-1880). A number of groE promoters such as the groES and groEL (chaperones) promoters are available for use as an inducible promoter in controlling the expression of the designer butanol-production-pathway enzymes. The groE promoter sequences that can be selected and modified for use in one of the various embodiments include (but not limited to) the groES and/or groEL promoters of the following oxyphotobacteria: Synechocystis sp. (GenBank: D12677.1), Synechocystis sp. PCC 6803 (GenBank: BA000022.2), Synechococcus elongatus PCC 6301 (GenBank: AP008231.1), Synechococcus sp (GenBank: M58751.1), Synechococcus elongatus PCC 7942 (GenBank: CP000100.1), Nostoc sp. PCC 7120 (GenBank: BA000019.2), Anabaena variabilis ATCC 29413 (GenBank: CP000117.1), Anabaena sp. L-31 (GenBank: AF324500); Thermosynechococcus elongatus BP-1 (CyanoBase: t110185, t110186), Synechococcus vulcanus (GenBank: D78139), Oscillatoria sp. NKBG091600 (GenBank: AF054630), Prochlorococcus marinus MIT9313 (GenBank: BX572099), Prochlorococcus marinus str. MIT 9303 (GenBank: CP000554), Prochlorococcus marinus str. MIT 9211 (GenBank: ZP_{—}01006613), Synechococcus sp. WH8102 (GenBank: BX569690), Synechococcus sp. CC9605 (GenBank: CP000110), Prochlorococcus marinus subsp. marinus str. CCMP1375 (GenBank: AE017126), and Prochlorococcus marinus MED4 (GenBank: BX548174).

[0082] Additional inducible promoters that can also be selected for use in the present invention include: for example, the metal (zinc)-inducible smt promoter of Synechococcus PCC 7942 (Erbe, Adams, Taylor and Hall (1996) “Cyanobacteria carrying an smt-lux transcriptional fusion as biosensors for the detection of heavy metal cations,” Journal of Industrial Microbiology, 17:80-83); the iron-responsive idiA promoter of Synechococcus elongatus PCC 7942 (Michel, Pistorius, and Golden (2001) “Unusual regulatory elements for iron deficiency induction of the idiA gene of Synechococcus elongatus PCC 7942” Journal of Bacteriology, 183(17):5015-5024); the redox-responsive cyanobacterial crhR promoter (Patterson-Fortin, Colvin and Owttrim (2006) “A LexA-related protein regulates redox-sensitive expression of the cyanobacterial RNA helicase, crhR”, Nucleic Acids Research, 34(12):3446-3454); the heat-shock gene hsp16.6 promoter of Synechocystis sp. PCC 6803 (Fang and Barnum (2004) “Expression of the heat shock gene hsp16.6 and promoter analysis in the Cyanobacterium, Synechocystis sp. PCC 6803,” Current Microbiology 49:192-198); the small heat-shock protein (Hsp) promoter such as Synechococcus vulcanus gene hspA promoter (Nakamoto, Suzuki, and Roy (2000) “Constitutive expression of a small heat-shock protein confers cellular thermotolerance and thermal protection to the photosynthetic apparatus in cyanobacteria,” FEBS Letters 483:169-174); the CO₂-responsive promoters of oxyphotobacterial carbonic-anhydrase genes (GenBank: EAZ90903, EAZ90685, ZP_{—}01624337, EAW33650, ABB17341, AAT41924, CAO89711, ZP_{—}00111671, YP_{—}400464, AAC44830; and CyanoBase: all2929, PMT1568 slr0051, slr1347, and syc0167_c); the nitrate-reductase-gene (narB) promoters (such as GenBank accession numbers: BAC08907, NP 682145, AAO25121; ABI46326, YP732075, BAB72570, NP_{—}484656); the green/red light-responsive promoters such as the light-regulated cpcB2A2 promoter of Fremyella diplosiphon (Casey and Grossman (1994) “In vivo and in vitro characterization of the light-regulated cpcB2A2 promoter of Fremyella diplosiphont” Journal of Bacteriology, 176(20):6362-6374); and the UV-light responsive promoters of cyanobacterial genes lexA, recA and ruvB (Domain, Houot, Chauvat, and Cassier-Chauvat (2004) “Function and regulation of the cyanobacterial genes lexA, recA and ruvB: LexA is critical to the survival of cells facing inorganic carbon starvation,” Molecular Microbiology, 53(1):65-80).

[0083] Furthermore, in one of the various embodiments, certain “semi-inducible” or constitutive promoters can also be selected for use in combination of an inducible promoter(s) for construction of a designer butanol-production pathway(s) as well. For example, the promoters of oxyphotobacterial Rubisco operon such as the rbcL genes (GenBank: X65960, ZP_{—}01728542, Q3M674, BAF48766, NP 895035, 0907262A; CyanoBase: PMT1205, PMM0550, Pro0551, tll1506, SYNW1718, glr2156, alr1524, slr0009), which have certain light-dependence but could be regarded almost as constitutive promoters, can also be selected for use in combination of an inducible promoter(s) such as the nirA, hox, and/or groE promoters for construction of the designer butanol-production pathway(s) as well.

[0084] Throughout this specification, when reference is made to inducible promoter, such as, for example, any of the inducible promoters described above, it includes their analogs, functional derivatives, designer sequences, and combinations thereof. A “functional analog” or “modified designer sequence” in this context refers to a promoter sequence derived or modified (by, e.g., substitution, moderate deletion or addition or modification of nucleotides) based on a native promoter sequence, such as those identified hereinabove, that retains the function of the native promoter sequence.

DNA Constructs and Transformation into Host Organisms

[0085] DNA constructs are generated in order to introduce designer butanol-production-pathway genes to a host alga, plant, plant tissue or plant cells. That is, a nucleotide sequence encoding a designer butanol-production-pathway enzyme is placed in a vector, in an operable linkage to a promoter, preferably an inducible promoter, and in an operable linkage to a nucleotide sequence coding for an appropriate chloroplast-targeting transit-peptide sequence. In a preferred embodiment, nucleic acid constructs are made to have the elements placed in the following 5′ (upstream) to 3′ (downstream) orientation: an externally inducible promoter, a transit targeting sequence, and a nucleic acid encoding a designer butanol-production-pathway enzyme, and preferably an appropriate transcription termination sequence. One or more designer genes (DNA constructs) can be placed into one genetic vector. An example of such a construct is depicted in FIG. 2A. As shown in the embodiment illustrated in FIG. 2A, a designer butanol-production-pathway transgene is a nucleic acid construct comprising: a) a PCR forward primer; b) an externally inducible promoter; c) a transit targeting sequence; d) a designer butanol-production-pathway-enzyme-encoding sequence with an appropriate transcription termination sequence; and e) a PCR reverse primer.

[0086] In accordance with various embodiments, any of the components a) through e) of this DNA construct are adjusted to suit for certain specific conditions. In practice, any of the components a) through e) of this DNA construct are applied in full or in part, and/or in any adjusted combination to achieve more desirable results. For example, when an algal hydrogenase promoter is used as an inducible promoter in the designer butanol-production-pathway DNA construct, a transgenic designer alga that contains this DNA construct will be able to perform autotrophic photosynthesis using ambient-air CO₂ as the carbon source and grows normally under aerobic conditions, such as in an open pond. When the algal culture is grown and ready for butanol production, the designer transgene(s) can then be expressed by induction under anaerobic conditions because of the use of the hydrogenase promoter. The expression of designer gene(s) produces a set of designer butanol-production-pathway enzymes to work with the Calvin cycle for photobiological butanol production (FIG. 1).

[0087] The two PCR primers are a PCR forward primer (PCR FD primer) located at the beginning (the 5′ end) of the DNA construct and a PCR reverse primer (PCR RE primer) located at the other end (the 3′ end) as shown in FIG. 2A. This pair of PCR primers is designed to provide certain convenience when needed for relatively easy PCR amplification of the designer DNA construct, which is helpful not only during and after the designer DNA construct is synthesized in preparation for gene transformation, but also after the designer DNA construct is delivered into the genome of a host alga for verification of the designer gene in the transformants. For example, after the transformation of the designer gene is accomplished in a Chlamydomonas reinhardtii-arg7 host cell using the techniques of electroporation and argininosuccinate lyase (arg7) complementation screening, the resulted transformants can be then analyzed by a PCR DNA assay of their nuclear DNA using this pair of PCR primers to verify whether the entire designer butanol-production-pathway gene (the DNA construct) is successfully incorporated into the genome of a given transformant. When the nuclear DNA PCR assay of a transformant can generate a PCR product that matches with the predicted DNA size and sequence according to the designer DNA construct, the successful incorporation of the designer gene(s) into the genome of the transformant is verified.

[0088] Therefore, the various embodiments also teach the associated method to effectively create the designer transgenic algae, plants, or plant cells for photobiological butanol production. This method, in one of embodiments, includes the following steps: a) Selecting an appropriate host alga, plant, plant tissue, or plant cells with respect to their genetic backgrounds and special features in relation to butanol production; b) Introducing the nucleic acid constructs of the designer genes into the genome of said host alga, plant, plant tissue, or plant cells; c) Verifying the incorporation of the designer genes in the transformed alga, plant, plant tissue, or plant cells with DNA PCR assays using the said PCR primers of the designer DNA construct; d) Measuring and verifying the designer organism features such as the inducible expression of the designer butanol-pathway genes for photosynthetic butanol production from carbon dioxide and water by assays of mRNA, protein, and butanol-production characteristics according to the specific designer features of the DNA construct(s) (FIG. 2A).

[0089] The above embodiment of the method for creating the designer transgenic organism for photobiological butanol production can also be repeatedly applied for a plurality of operational cycles to achieve more desirable results. In various embodiments, any of the steps a) through d) of this method described above are adjusted to suit for certain specific conditions. In various embodiments, any of the steps a) through d) of the method are applied in full or in part, and/or in any adjusted combination.

[0090] Examples of designer butanol-production-pathway genes (DNA constructs) are shown in the sequence listings. SEQ ID NO: 1 presents a detailed DNA construct of a designer Butanol Dehydrogenase gene (1809 bp) that includes a PCR FD primer (sequence 1-20), a 262-bp nitrate reductase Nia1 promoter (21-282), a 135-bp RbcS2 transit peptide (283-417), an enzyme-encoding sequence (418-1566) selected and modified from a Clostridium saccharoperbutylacetonicum Butanol Dehydrogenase sequence (AB257439), a 223-bp RbcS2 terminator (1567-1789), and a PCR RE primer (1790-1809). The 262-bp Nia1 promoter (DNA sequence 21-282) is used as an example of an inducible promoter to control the expression of a designer butanol-production-pathway Butanol Dehydrogenase gene (DNA sequence 418-1566). The 135-bp RbcS2 transit peptide (DNA sequence 283-417) is used as an example to guide the insertion of the designer enzyme (DNA sequence 418-1566) into the chloroplast of the host organism. The RbcS2 terminator (DNA sequence 1567-1789) is employed so that the transcription and translation of the designer gene is properly terminated to produce the designer apoprotein (RbcS2 transit peptide-Butanol Dehydrogenase) as desired. Because the Nia1 promoter is a nuclear DNA that can control the expression only for nuclear genes, the synthetic butanol-production-pathway gene in this example is designed according to the codon usage of Chlamydomonas nuclear genome. Therefore, in this case, the designer enzyme gene is transcribed in nucleus. Its mRNA is naturally translocated into cytosol, where the mRNA is translated to an apoprotein that consists of the RbcS2 transit peptide (corresponding to DNA sequence 283-417) with its C-terminal end linked together with the N-terminal end of the Butanol Dehydrogenase protein (corresponding to DNA sequence 418-1566). The transit peptide of the apoprotein guides its transportation across the chloroplast membranes and into the stroma area, where the transit peptide is cut off from the apoprotein. The resulting Butanol Dehydrogenase then resumes its function as an enzyme for the designer butanol-production pathway in chloroplast. The two PCR primers (sequences 1-20 and 1790-1809) are selected and modified from the sequence of a Human actin gene and can be paired with each other. Blasting the sequences against Chlamydomonas GenBank found no homologous sequences of them. Therefore, they can be used as appropriate PCR primers in DNA PCR assays for verification of the designer gene in the transformed alga.

[0091] SEQ ID NO: 2 presents example 2 for a designer Butyraldehyde Dehydrogenase DNA construct (2067 bp) that includes a PCR FD primer (sequence 1-20), a 262-bp nitrate reductase Nia1 promoter (21-282), a 135-bp RbcS2 transit peptide (283-417), a Butyraldehyde Dehydrogenase-encoding sequence (418-1824) selected and modified from a Clostridium saccharoperbutylacetonicum Butyraldehyde Dehydrogenase sequence (AY251646), a 223-bp RbcS2 terminator (1825-2047), and a PCR RE primer (2048-2067). This DNA construct is similar to example 1, SEQ ID NO: 1, except that a Butyraldehyde Dehydrogenase-encoding sequence (418-1824) selected and modified from a Clostridium saccharoperbutylacetonicum Butyraldehyde Dehydrogenase sequence (AY251646) is used.

[0092] SEQ ID NO: 3 presents example 3 for a designer Butyryl-CoA Dehydrogenase construct (1815 bp) that includes a PCR FD primer (sequence 1-20), a 262-bp nitrate reductase promoter (21-282), a 9-bp Xho I NdeI site (283-291), a 135-bp RbcS2 transit peptide (292-426), a Butyryl-CoA Dehydrogenase encoding sequence (427-1563) selected/modified from the sequences of a Clostridium beijerinckii Butyryl-CoA Dehydrogenase (AF494018), a 9-bp XbaI site (1564-1572), a 223-bp RbcS2 terminator (1573-1795), and a PCR RE primer (1796-1815) at the 3′ end. This DNA construct is similar to example 1, SEQ ID NO: 1, except that a Butyryl-CoA Dehydrogenase encoding sequence (427-1563) selected/modified from the sequences of a Clostridium beijerinckii Butyryl-CoA Dehydrogenase (AF494018) is used and restriction sites of Xho I NdeI and XbaI are added to make the key components such as the targeting sequence (292-426) and the designer enzyme sequence (427-1563) as a modular unit that can be flexible replaced when necessary to save cost of gene synthesis and enhance work productivity. Please note, the enzyme does not have to be Clostridium beijerinckii Butyryl-CoA Dehydrogenase; a number of butyryl-CoA dehydrogenase enzymes (such as those listed in Table 1) including their isozymes, designer modified enzymes, and functional analogs from other sources such as Butyrivibrio fibrisolvens, Butyrate-producing bacterium L2-50, Thermoanaerobacterium thermosaccharolyticum, can also be selected for use.

[0093] SEQ ID NO: 4 presents example 4 for a designer Crotonase DNA construct (1482 bp) that includes a PCR FD primer (sequence 1-20), a 262-bp nitrate reductase promoter (21-282), a 9-bp Xho I NdeI site (283-291) a 135-bp RbcS2 transit peptide (292-426), a Crotonase-encoding sequence (427-1209) selected/modified from the sequences of a Clostridium beijerinckii Crotonase (GenBank: AF494018), a 21-bp Lumio-tag-encoding sequence (1210-1230), a 9-bp XbaI site (1231-1239) containing a stop codon, a 223-bp RbcS2 terminator (1240-1462), and a PCR RE primer (1463-1482) at the 3′ end. This DNA construct is similar to example 3, SEQ ID NO: 3, except that a Crotonase-encoding sequence (427-1209) selected/modified from the sequences of a Clostridium beijerinckii Crotonase (GenBank: AF494018) is used and a 21-bp Lumio-tag-encoding sequence (1210-1230) is added at the C-terminal end of the enolase sequence. The 21-bp Lumio-tag sequence (1210-1230) is employed here to encode a Lumio peptide sequence Gly-Cys-Cys-Pro-Gly-Cys-Cys, which can become fluorescent when treated with a Lumio reagent that is now commercially available from Invitrogen [https://catalog.invitrogen.com]. Lumio molecular tagging technology is based on an EDT (1,2-ethanedithiol) coupled biarsenical derivative (the Lumio reagent) of fluorescein that binds to an engineered tetracysteine sequence (Keppetipola, Coffman, and et al (2003). Rapid detection of in vitro expressed proteins using Lumio™ technology, Gene Expression, 25.3: 7-11). The tetracysteine sequence consists of Cys-Cys-Xaa-Xaa-Cys-Cys, where Xaa is any non-cysteine amino acid such as Pro or Gly in this example. The EDT-linked Lumio reagent allows free rotation of the arsenic atoms that quenches the fluorescence of fluorescein. Covalent bond formation between the thiols of the Lumio's arsenic groups and the tetracysteines prevents free rotation of arsenic atoms that releases the fluorescence of fluorescein (Griffin, Adams, and Tsien (1998), “Specific covalent labeling of recombinant protein molecules inside live cells”, Science, 281:269-272). This also permits the visualization of the tetracysteine-tagged proteins by fluorescent molecular imaging. Therefore, use of the Lumio tag in this manner enables monitoring and/or tracking of the designer Crotonase when expressed to verify whether the designer butanol-production pathway enzyme is indeed delivered into the chloroplast of a host organism as designed. The Lumio tag (a short 7 amino acid peptide) that is linked to the C-terminal end of the Crotonase protein in this example should have minimal effect on the function of the designer enzyme, but enable the designer enzyme molecule to be visualized when treated with the Lumio reagent. Use of the Lumio tag is entirely optional. If the Lumio tag somehow affects the designer enzyme function, this tag can be deleted in the DNA sequence design.

[0094] SEQ ID NO: 5 presents example 5 for a designer 3-Hydroxybutyryl-CoA Dehydrogenase DNA construct (1367 bp) that includes a PCR FD primer (sequence 1-20), a 84-bp nitrate reductase promoter (21-104), a 9-bp Xho I NdeI site (105-113) a 135-bp RbcS2 transit peptide (114-248), a 3-Hydroxybutyryl-CoA Dehydrogenase-encoding sequence (249-1094) selected/modified from a Clostridium beijerinckii 3-Hydroxybutyryl-CoA Dehydrogenase sequence (Genbank: AF494018), a 21-bp Lumio-tag sequence (1095-1115), a 9-bp XbaI site (1116-1124), a 223-bp RbcS2 terminator (1125-1347), and a PCR RE primer (1348-1367). This DNA construct is similar to example 4, SEQ ID NO: 4, except that an 84-bp nitrate reductase promoter (21-104) and a 3-Hydroxybutyryl-CoA Dehydrogenase-encoding sequence (249-1094) selected/modified from a Clostridium beijerinckii 3-Hydroxybutyryl-CoA Dehydrogenase sequence (Genbank: AF494018) are used. The 84-bp nitrate-reductase promoter is artificially created by joining two partially homologous sequence regions (−231 to −201 and −77 to −25 with respect to the start site of transcription) of the native Chlamydomonas reinhardtii Nia1 promoter. Experimental studies have demonstrated that the 84-bp sequence is more active than the native Nia1 promoter (Loppes and Radoux (2002) “Two short regions of the promoter are essential for activation and repression of the nitrate reductase gene in Chlamydomonas reinhardtii,” Mol Genet Genomics 268: 42-48). Therefore, this is also an example where functional synthetic sequences, analogs, functional derivatives and/or designer modified sequences such as the synthetic 84-bp sequence can be selected for use according to various embodiments in this invention.

[0095] SEQ ID NO: 6 presents example 6 for a designer Thiolase DNA construct (1721 bp) that includes a PCR FD primer (sequence 1-20), a 84-bp nitrate reductase promoter (21-104), a 9-bp Xho I NdeI site (105-113) a 135-bp RbcS2 transit peptide (114-248), a Thiolase-encoding sequence (248-1448) selected/modified from a Butyrivibrio fibrisolvens Thiolase sequence (AB190764), a 21-bp Lumio-tag sequence (1449-1469), a 9-bp XbaI site (1470-1478), a 223-bp RbcS2 terminator (1479-1701), and a PCR RE primer (1702-1721). This DNA construct is also similar to example 4, SEQ ID NO: 4, except that a Thiolase-encoding-encoding sequence (249-1448) and an 84-bp synthetic Nia1 promoter (21-104) are used. This is another example that functional synthetic sequences can also be selected for use in designer DNA constructs.

[0096] SEQ ID NO: 7 presents example 7 for a designer Pyruvate-Ferredoxin Oxidoreductase DNA construct (4211 bp) that includes a PCR FD primer (sequence 1-20), a 2×84-bp nitrate reductase promoter (21-188), a 9-bp Xho I NdeI site (189-197) a 135-bp RbcS2 transit peptide (198-332), a Pyruvate-Ferredoxin Oxidoreductase-encoding sequence (333-3938) selected/modified from the sequences of a Mastigamoeba balamuthi Pyruvate-ferredoxin oxidoreductase (GenBank: AY101767), a 21-bp Lumio-tag sequence (3939-3959), a 9-bp XbaI site (3960-3968), a 223-bp RbcS2 terminator (3969-4191), and a PCR RE primer (4192-4211). This DNA construct is also similar to example 4, SEQ ID NO: 4, except a designer 2×84-bp Nia1 promoter and a Pyruvate-Ferredoxin Oxidoreductase-encoding sequence (333-3938) selected/modified from the sequences of a Mastigamoeba balamuthi Pyruvate-ferredoxin oxidoreductase (GenBank: AY101767) are used. The 2×84-bp Nia1 promoter is constructed as a tandem duplication of the 84-bp synthetic Nia1 promoter sequence presented in SEQ ID NO: 6 above. Experimental tests have shown that the 2×84-bp synthetic Nia1 promoter is even more powerful than the 84-bp sequence which is more active than the native Nia1 promoter (Loppes and Radoux (2002) “Two short regions of the promoter are essential for activation and repression of the nitrate reductase gene in Chlamydomonas reinhardtii,” Mol Genet Genomics 268: 42-48). Use of this type of inducible promoter sequences with various promoter strengths can also help in adjusting the expression levels of the designer enzymes for the butanol-production pathway(s).

[0097] SEQ ID NO: 8 presents example 8 for a designer Pyruvate Kinase DNA construct (2021 bp) that includes a PCR FD primer (sequence 1-20), a 84-bp nitrate reductase promoter (21-104), a 9-bp Xho I NdeI site (105-113) a 135-bp RbcS2 transit peptide (114-248), a pyruvate kinase-encoding sequence (249-1748) selected/modified from a Saccharomyces cerevisiae Pyruvate Kinase sequence (GenBank: AY949876), a 21-bp Lumio-tag sequence (1749-1769), a 9-bp XbaI site (1770-1778), a 223-bp RbcS2 terminator (1779-2001), and a PCR RE primer (2002-2021). This DNA construct is similar to example 6, SEQ ID NO: 6, except that a pyruvate kinase-encoding sequence (249-1748) is used.

[0098] SEQ ID NO: 9 presents example 9 for a designer Enolase gene (1815 bp) consisting of a PCR FD primer (sequence 1-20), a 262-bp nitrate reductase promoter (21-282), a 9-bp Xho I NdeI site (283-291) a 135-bp RbcS2 transit peptide (292-426), a enolase-encoding sequence (427-1542) selected/modified from the sequences of a Chlamydomonas reinhardtii cytosolic enolase (Genbank: X66412, P31683), a 21-bp Lumio-tag-encoding sequence (1507-1527), a 9-bp XbaI site (1543-1551) containing a stop codon, a 223-bp RbcS2 terminator (1552-1795), and a PCR RE primer (1796-1815) at the 3′ end. This DNA construct is similar to example 3, SEQ ID NO: 3, except that an enolase-encoding sequence (427-1542) selected/modified from the sequences of a Chlamydomonas reinhardtii cytosolic enolase is used.

[0099] SEQ ID NO: 10 presents example 10 for a designer Phosphoglycerate-Mutase DNA construct (2349 bp) that includes a PCR FD primer (sequence 1-20), a 262-bp nitrate reductase promoter (21-282), a 9-bp Xho I NdeI site (283-291), a 135-bp RbcS2 transit peptide (292-426), a phosphoglycerate-mutase encoding sequence (427-2097) selected/modified from the sequences of a Chlamydomonas reinhardtii cytosolic phosphoglycerate mutase (JGI Chlre2 protein ID 161689, Genbank: AF268078), a 9-bp XbaI site (2098-2106), a 223-bp RbcS2 terminator (2107-2329), and a PCR RE primer (2330-2349) at the 3′ end. This DNA construct is similar to example 3, SEQ ID NO: 3, except that a phosphoglycerate-mutase encoding sequence (427-2097) selected/modified from the sequences of a Chlamydomonas reinhardtii cytosolic phosphoglycerate mutase is used.

[0100] SEQ ID NO: 11 presents example 11 for a designer Phosphoglycerate Kinase DNA construct (1908 bp) that includes a PCR FD primer (sequence 1-20), a 262-bp nitrate reductase Nia1 promoter (21-282), a phosphoglycerate-kinase-encoding sequence (283-1665) selected from a Chlamydomonas reinhardtii chloroplast phosphoglycerate-kinase sequence including its chloroplast signal peptide and mature enzyme sequence (GenBank: U14912), a 223-bp RbcS2 terminator (1666-1888), and a PCR RE primer (1889-1908). This DNA construct is similar to example 1, SEQ ID NO: 1, except a phosphoglycerate-kinase-encoding sequence (283-1665) selected from a Chlamydomonas reinhardtii chloroplast phosphoglycerate-kinase sequence including its chloroplast signal peptide and mature enzyme sequence is used. Therefore, this is also an example where the sequence of a nuclear-encoded chloroplast enzyme such as the Chlamydomonas reinhardtii chloroplast phosphoglycerate kinase can also be used in design and construction of a designer butanol-production pathway gene when appropriate with a proper inducible promoter such as the Nia1 promoter (DNA sequence 21-282).

[0101] SEQ ID NO: 12 presents example 12 for a designer Glyceraldehyde-3-Phosphate Dehydrogenase gene (1677 bp) that includes a PCR FD primer (sequence 1-20), a 262-bp nitrate reductase Nia1 promoter (21-282), a 135-bp RbcS2 transit peptide (283-417), an enzyme-encoding sequence (418-1434) selected and modified from a Mesostigma viride cytosolic glyceraldehyde-3-phosphate dehydrogenase (mRNA) sequence (GenBank accession number DQ873404), a 223-bp RbcS2 terminator (1435-1657), and a PCR RE primer (1658-1677). This DNA construct is similar to example 1, SEQ ID NO: 1, except that an enzyme-encoding sequence (418-1434) selected and modified from a Mesostigma viride cytosolic glyceraldehyde-3-phosphate dehydrogenase (mRNA) sequence (GenBank accession number DQ873404) is used.

[0102] SEQ ID NO: 13 presents example 13 for a designer HydA1-promoter-linked Phosphoglycerate Mutase DNA construct (2351 bp) that includes a PCR FD primer (sequence 1-20), a 282-bp HydA1 promoter (21-302), a 135-bp RbcS2 transit peptide (303-437), a phosphoglycerate-mutase encoding sequence (438-2108) selected/modified from the sequences of a Chlamydomonas reinhardtii cytosolic phosphoglycerate mutase (JGI Chlre2 protein ID 161689, Genbank: AF268078), a 223-bp RbcS2 terminator (2109-2331), and a PCR RE primer (2332-2351). This designer DNA construct is quite similar to example 1, SEQ ID NO:1, except that a 282-bp HydA1 promoter (21-302) and a phosphoglycerate-mutase encoding sequence (438-2108) selected/modified from the sequences of a Chlamydomonas reinhardtii cytosolic phosphoglycerate mutase are used. The 282-bp HydA1 promoter (21-302) has been proven active by experimental assays at the inventor's laboratory. Use of the HydA1 promoter (21-302) enables activation of designer enzyme expression by using anaerobic culture-medium conditions.

[0103] With the same principle of using an inducible anaerobic promoter and a chloroplast-targeting sequence as that shown in SEQ ID NO: 13 (example 13), SEQ ID NOS: 14-23 show designer-gene examples 14-23. Briefly, SEQ ID NO: 14 presents example 14 for a designer HydA1-promoter-linked Enolase DNA construct (1796 bp) that includes a PCR FD primer (sequence 1-20), a 282-bp HydA1 promoter (21-302), a 135-bp RbcS2 transit peptide (303-437), a Enolase-encoding sequence (438-1553) selected/modified from the sequences of a Chlamydomonas reinhardtii cytosolic enolase (Genbank: X66412, P31683), a 223-bp RbcS2 terminator (1554-1776), and a PCR RE primer (1777-1796).

[0104] SEQ ID NO: 15 presents example 15 for a designer HydA1-promoter-controlled Pyruvate-Kinase DNA construct that includes a PCR FD primer (sequence 1-20), a 282-bp HydA1 promoter (21-302), a 135-bp RbcS2 transit peptide (303-437), a Pyruvate Kinase-encoding sequence (438-1589) selected/modified from a Chlamydomonas reinhardtii cytosolic pyruvate kinase sequence (JGI Chlre3 protein ID 138105), a 223-bp RbcS2 terminator (1590-1812), and a PCR RE primer (1813-1832).

[0105] SEQ ID NO:16 presents example 16 for a designer HydA1-promoter-linked Pyruvate-ferredoxin oxidoreductase DNA construct (4376 bp) that includes a PCR FD primer (sequence 1-20), a 282-bp HydA1 promoter (21-302), a 135-bp RbcS2 transit peptide (303-437), a Pyruvate-ferredoxin oxidoreductase-encoding sequence (438-4133) selected/modified from a Desulfovibrio africanus Pyruvate-ferredoxin oxidoreductase sequence (GenBank Accession Number Y09702), a 223-bp RbcS2 terminator (4134-4356), and a PCR RE primer (4357-4376).

[0106] SEQ ID NO:17 presents example 17 for a designer HydA1-promoter-linked Pyruvate-NADP⁺ oxidoreductase DNA construct (6092 bp) that includes a PCR FD primer (sequence 1-20), a 282-bp HydA1 promoter (21-302), a 135-bp RbcS2 transit peptide (303-437), a Pyruvate-NADP⁺ oxidoreductase-encoding sequence (438-5849) selected/modified from a Euglena gracilis Pyruvate-NADP⁺ oxidoreductase sequence (GenBank Accession Number AB021127), a 223-bp RbcS2 terminator (5850-6072), and a PCR RE primer (6073-6092).

[0107] SEQ ID NO:18 presents example 18 for a designer HydA1-promoter-linked Thiolase DNA construct (1856 bp) that includes a PCR FD primer (sequence 1-20), a 282-bp HydA1 promoter (21-302), a 135-bp RbcS2 transit peptide (303-437), a Thiolase-encoding sequence (438-1613) selected/modified from the sequences of a Thermoanaerobacterium thermosaccharolyticum Thiolase (GenBank Z92974), a 223-bp RbcS2 terminator (1614-1836), and a PCR RE primer (1837-1856).

[0108] SEQ ID NO:19 presents example 19 for a designer HydA1-promoter-linked 3-Hydroxybutyryl-CoA dehydrogenase DNA construct (1550 bp) that includes a PCR FD primer (sequence 1-20), a 282-bp HydA1 promoter (21-302), a 135-bp RbcS2 transit peptide (303-437), a 3-Hydroxybutyryl-CoA dehydrogenase-encoding sequence (438-1307) selected/modified from the sequences of a Thermoanaerobacterium thermosaccharolyticum 3-Hydroxybutyryl-CoA dehydrogenase (GenBank Z92974), a 223-bp RbcS2 terminator (1308-1530), and a PCR RE primer (1531-1550).

[0109] SEQ ID NO:20 presents example 20 for a designer HydA1-promoter-linked Crotonase DNA construct (1457 bp) that includes a PCR FD primer (sequence 1-20), a 282-bp HydA1 promoter (21-302), a 135-bp RbcS2 transit peptide (303-437), a Crotonase-encoding sequence (438-1214) selected/modified from the sequences of a Thermoanaerobacterium thermosaccharolyticum Crotonase (GenBank Z92974), a 223-bpRbcS2 terminator (1215-1437), and a PCR RE primer (1438-1457).

[0110] SEQ ID NO:21 presents example 21 for a designer HydA1-promoter-linked Butyryl-CoA dehydrogenase DNA construct (1817 bp) that includes a PCR FD primer (sequence 1-20), a 282-bp HydA1 promoter (21-302), a 135-bp RbcS2 transit peptide (303-437), a Butyryl-CoA dehydrogenase-encoding sequence (438-1574) selected/modified from the sequences of a Thermoanaerobacterium thermosaccharolyticum Butyryl-CoA dehydrogenase (GenBank Z92974), a 223-bp RbcS2 terminator (1575-1797), and a PCR RE primer (1798-1817).

[0111] SEQ ID NO: 22 presents example 22 for a designer HydA1-promoter-linked Butyraldehyde dehydrogenase DNA construct (2084 bp) that includes a PCR FD primer (sequence 1-20), a 282-bp HydA1 promoter (21-302), a 135-bp RbcS2 transit peptide (303-437), a Butyraldehyde dehydrogenase-encoding sequence (438-1841) selected/modified from the sequences of a Clostridium saccharoperbutylacetonicum Butyraldehyde dehydrogenase (GenBank AY251646), a 223-bp RbcS2 terminator (1842-2064), and a PCR RE primer (2065-2084).

[0112] SEQ ID NO: 23 presents example 23 for a designer HydA1-promoter-linked Butanol dehydrogenase DNA construct (1733 bp) that includes a PCR FD primer (sequence 1-20), a 282-bp HydA1 promoter (21-302), a 135-bp RbcS2 transit peptide (303-437), a Butanol dehydrogenase-encoding sequence (438-1490) selected/modified from the sequences of a Clostridium beijerinckii Butanol dehydrogenase (GenBank AF157307), a 223-bp RbcS2 terminator (1491-1713), and a PCR RE primer (1714-1733).

[0113] With the same principle of using a 2×84 synthetic Nia1 promoter and a chloroplast-targeting mechanism as mentioned previously, SEQ ID NOS:24-26 show more examples of designer-enzyme DNA-constructs. Briefly, SEQ ID NO: 24 presents example 24 for a designer Fructose-Diphosphate-Aldolase DNA construct that includes a PCR FD primer (sequence 1-20), a 2×84-bp NR promoter (21-188), a Fructose-Diphosphate Aldolase-encoding sequence (189-1313) selected/modified from a C. reinhardtii chloroplast fructose-1,6-bisphosphate aldolase sequence (GenBank: X69969), a 223-bpRbcS2 terminator (1314-1536), and a PCR RE primer (1537-1556).

[0114] SEQ ID NO: 25 presents example 24 for a designer Triose-Phosphate-Isomerase DNA construct that includes a PCR FD primer (sequence 1-20), a 2×84-bp NR promoter (21-188), a Triose-Phosphate Isomerase-encoding sequence (189-1136) selected and modified from a Arabidopsis thaliana chloroplast triosephosphate-isomerase sequence (GenBank: AF247559), a 223-bp RbcS2 terminator (1137-1359), and a PCR RE primer (1360-1379).

[0115] SEQ ID NO: 26 presents example 26 for a designer Phosphofructose-Kinase DNA construct that includes a PCR FD primer (sequence 1-20), a 2×84-bp NR promoter (21-188), a 135-bp RbcS2 transit peptide (189-323), a Phosphofructose Kinase-encoding sequence (324-1913) selected/modified from Arabidopsis thaliana 6-phosphofructokinase sequence (GenBank: NM 001037043), a 223-bp RbcS2 terminator (1914-2136), and a PCR RE primer (2137-2156).

[0116] The nucleic acid constructs, such as those presented in the examples above, may include additional appropriate sequences, for example, a selection marker gene, and an optional biomolecular tag sequence (such as the Lumio tag described in example 4, SEQ ID NO: 4). Selectable markers that can be selected for use in the constructs include markers conferring resistances to kanamycin, hygromycin, spectinomycin, streptomycin, sulfonyl urea, gentamycin, chloramphenicol, among others, all of which have been cloned and are available to those skilled in the art. Alternatively, the selective marker is a nutrition marker gene that can complement a deficiency in the host organism. For example, the gene encoding argininosuccinate lyase (arg7) can be used as a selection marker gene in the designer construct, which permits identification of transformants when Chlamydomonas reinhardtii arg7-(minus) cells are used as host cells.

[0117] Nucleic acid constructs carrying designer genes can be delivered into a host alga, blue-green alga, plant, or plant tissue or cells using the available gene-transformation techniques, such as electroporation, PEG induced uptake, and ballistic delivery of DNA, and Agrobacterium-mediated transformation. For the purpose of delivering a designer construct into algal cells, the techniques of electroporation, glass bead, and biolistic genegun can be selected for use as preferred methods; and an alga with single cells or simple thallus structure is preferred for use in transformation. Transformants can be identified and tested based on routine techniques.

[0118] The various designer genes can be introduced into host cells sequentially in a step-wise manner, or simultaneously using one construct or in one transformation. For example, the ten DNA constructs shown in SEQ ID NO: 13-16 (or 17) and 18-23 for the ten-enzyme 3-phosphoglycerate-branched butanol-production pathway can be placed into a genetic vector such as p389-Arg7 with a single selection marker (Arg7). Therefore, by use of a plasmid in this manner, it is possible to deliver all the ten DNA constructs (designer genes) into an arginine-requiring Chlamydomonas reinhardtii-arg7 host (CC-48) in one transformation for expression of the 3-phosphoglycerate-branched butanol-production pathway (03-12 in FIG. 1). When necessary, a transformant containing the ten DNA constructs can be further transformed to get more designer genes into its genomic DNA with an additional selection marker such as streptomycin. By using combinations of various designer-enzymes DNA constructs such as those presented in SEQ ID NO: 1-26 in genetic transformation with an appropriate host organism, various butanol-production pathways such as those illustrated in FIG. 1 can be constructed. For example, the designer DNA constructs of SEQ ID NO: 1-12 can be selected for construction of the glyceraldehydes-3-phosphate-branched butanol-production pathway (01-12 in FIG. 1); The designer DNA constructs of SEQ ID NO: 1-12, 24, and 25 can be selected for construction of the fructose-1,6-diphosphate-branched butanol-production pathway (20-33); and the designer DNA constructs of SEQ ID NO: 1-12 and 24-26 can be selected for construction of the fructose-6-phosphate-branched butanol-production pathway (19-33).

### Additional Host Modifications to Enhance Photosynthetic Butanol Production

### An NADPH/NADH Conversion Mechanism

[0119] According to the photosynthetic butanol production pathway(s), to produce one molecule of butanol from 4CO₂ and 5H₂O is likely to require 14 ATP and 12 NADPH, both of which are generated by photosynthetic water splitting and photophosphorylation across the thylakoid membrane. In order for the 3-phosphoglycerate-branched butanol-production pathway (03-12 in FIG. 1) to operate, it is a preferred practice to use a butanol-production-pathway enzyme(s) that can use NADPH that is generated by the photo-driven electron transport process. Clostridium saccharoperbutylacetonicum butanol dehydrogenase (GenBank accession number: AB257439) and butyaldehyde dehydrogenase (GenBank: AY251646) are examples of a butanol-production-pathway enzyme that is capable of accepting either NADP(H) or NAD(H). Such a butanol-production-pathway enzyme that can use both NADPH and NADH (i.e., NAD(P)H) can also be selected for use in this 3-phosphoglycerate-branched and any of the other designer butanol-production pathway(s) (FIG. 1) as well. Clostridium beijerinckii Butyryl-CoA dehydrogenase (GenBank: AF494018) and 3-Hydroxybutyryl-CoA dehydrogenase (GenBank: AF494018) are examples of a butanol-production-pathway enzyme that can accept only NAD(H). When a butanol-production-pathway enzyme that can only use NADH is employed, it may require an NADPH/NADH conversion mechanism in order for this 3-phosphoglycerate-branched butanol-production pathway to operate well. However, depending on the genetic backgrounds of a host organism, a conversion mechanism between NADPH and NADH may exist in the host so that NADPH and NADH may be interchangeably used in the organism. In addition, it is known that NADPH could be converted into NADH by a NADPH-phosphatase activity (Pattanayak and Chatterjee (1998) “Nicotinamide adenine dinucleotide phosphate phosphatase facilitates dark reduction of nitrate: regulation by nitrate and ammonia,” Biologia Plantarium 41(1):75-84) and that NAD can be converted to NADP by a NAD kinase activity (Muto, Miyachi, Usuda, Edwards and Bassham (1981) “Light-induced conversion of nicotinamide adenine dinucleotide to nicotinamide adenine dinucleotide phosphate in higher plant leaves,” Plant Physiology 68(2):324-328; Matsumura-Kadota, Muto, Miyachi (1982) “Light-induced conversion of NAD⁺ to NADP⁺ in Chlorella cells,” Biochimica Biophysica Acta 679(2):300-300). Therefore, when enhanced NADPH/NADH conversion is desirable, the host may be genetically modified to enhance the NADPH phosphatase and NAD kinase activities. Thus, in one of the various embodiments, the photosynthetic butanol-producing designer plant, designer alga or plant cell further contains additional designer transgenes (FIG. 2B) to inducibly express one or more enzymes to facilitate the NADPH/NADH inter-conversion, such as the NADPH phosphatase and NAD kinase (GenBank: XM_{—}001609395, XM_{—}001324239), in the stroma of algal chloroplast.

[0120] Another embodiment that can provide an NADPH/NADH conversion mechanism is by properly selecting an appropriate branching point at the Calvin cycle for a designer butanol-production pathway to branch from. To confer this NADPH/NADH conversion mechanism by pathway design according to this embodiment, it is a preferred practice to branch a designer butanol-production pathway at or after the point of glyceraldehydes-3-phosphate of the Calvin cycle as shown in FIG. 1. In these pathway designs, the NADPH/NADH conversion is achieved essentially by a two-step mechanism: 1) Use of the step with the Calvin-cycle's glyceraldehyde-3-phosphate dehydrogenase, which uses NADPH in reducing 1,3-diphosphoglycerate to glyceraldehydes-3-phosphate; and 2) use of the step with the designer pathway's NAD⁺-dependent glyceraldehyde-3-phosphate dehydrogenase 01, which produces NADH in oxidizing glyceraldehyde-3-phosphate to1,3-diphosphoglycerate. The net result of the two steps described above is the conversion of NADPH to NADH, which can supply the needed reducing power in the form of NADH for the designer butanol-production pathway(s). For step 1), use of the Calvin-cycle's NADPH-dependent glyceraldehyde-3-phosphate dehydrogenase naturally in the host organism is usually sufficient. Consequently, introduction of a designer NAD⁺-dependent glyceraldehyde-3-phosphate dehydrogenase 01 to work with the Calvin-cycle's NADPH-dependent glyceraldehyde-3-phosphate dehydrogenase may confer the function of an NADPH/NADH conversion mechanism, which is needed for the 3-phosphoglycerate-branched butanol-production pathway (03-12 in FIG. 1) to operate well. For this reason, the designer NAD⁺-dependent glyceraldehyde-3-phosphate-dehydrogenase DNA construct (example 12, SEQ ID NO:12) is used also as an NADPH/NADH-conversion designer gene (FIG. 2B) to support the 3-phosphoglycerate-branched butanol-production pathway (03-12 in FIG. 1) in one of the various embodiments. This also explains why it is important to use a NAD⁺-dependent glyceraldehyde-3-phosphate dehydrogenase 01 to confer this two-step NADPH/NADH conversion mechanism for the designer butanol-production pathway(s). Therefore, in one of the various embodiments, it is also a preferred practice to use a NAD⁺-dependent glyceraldehyde-3-phosphate dehydrogenase, its isozymes, functional derivatives, analogs, designer modified enzymes and/or combinations thereof in the designer butanol-production pathway(s) as illustrated in FIG. 1.

iRNA Techniques to Further Tame Photosynthesis Regulation Mechanism

[0121] In another embodiment of the present invention, the host plant or cell is further modified to tame the Calvin cycle so that the host can directly produce liquid fuel butanol instead of synthesizing starch (glycogen in the case of oxyphotobacteria), celluloses and lignocelluloses that are often inefficient and hard for the biorefinery industry to use. According to the one of the various embodiments, inactivation of starch-synthesis activity is achieved by suppressing the expression of any of the key enzymes, such as, starch synthase (glycogen synthase in the case of oxyphotobacteria) 13, glucose-1-phosphate (G-1-P) adenylyltransferase 14, phosphoglucomutase 15, and hexose-phosphate-isomerase 16 of the starch-synthesis pathway which connects with the Calvin cycle (FIG. 1).

[0122] Introduction of a genetically transmittable factor that can inhibit the starch-synthesis activity that is in competition with designer butanol-production pathway(s) for the Calvin-cycle products can further enhance photosynthetic butanol production. In a specific embodiment, a genetically encoded-able inhibitor (FIG. 2C) to the competitive starch-synthesis pathway is an interfering RNA (iRNA) molecule that specifically inhibits the synthesis of a starch-synthesis-pathway enzyme, for example, starch synthase 16, glucose-1-phosphate (G-1-P) adenylyltransferase 15, phosphoglucomutase 14, and/or hexose-phosphate-isomerase 13 as shown with numerical labels 13-16 in FIG. 1. The DNA sequences encoding starch synthase iRNA, glucose-1-phosphate (G-1-P) adenylyltransferase iRNA, a phosphoglucomutase iRNA and/or a G-P-isomerase iRNA, respectively, can be designed and synthesized based on RNA interference techniques known to those skilled in the art (Liszewski (Jun. 1, 2003) Progress in RNA interference, Genetic Engineering News, Vol. 23, number 11, pp. 1-59). Generally speaking, an interfering RNA (iRNA) molecule is anti-sense but complementary to a normal mRNA of a particular protein (gene) so that such iRNA molecule can specifically bind with the normal mRNA of the particular gene, thus inhibiting (blocking) the translation of the gene-specific mRNA to protein (Fire, Xu, Montgomery, Kostas, Driver, Mello (1998) “Potent and specific genetic interference by double-stranded RNA in Caenorhabditis elegans”. Nature 391(6669):806-11; Dykxhoorn, Novina, Sharp (2003) “Killing the messenger: short RNAs that silence gene expression”, Nat Rev Mol Cell Biol. 4(6):457-67).

[0123] Examples of a designer starch-synthesis iRNA DNA construct (FIG. 2C) are shown in SEQ ID NO: 27 and 28 listed. Briefly, SEQ ID NO: 27 presents example 27 for a designer Nia1-promoter-controlled Starch-Synthase-iRNA DNA construct (860 bp) that includes a PCR FD primer (sequence 1-20), a 262-bp Nia1 promoter (21-282), a Starch-Synthase iRNA sequence (283-617) consisting of start codon atg and a reverse complement sequence of two unique sequence fragments of a Chlamydomonas reinhardtii starch-synthase-mRNA sequence (GenBank: AF026422), a 223-bp RbcS2 terminator (618-850), and a PCR RE primer (851-860). Because of the use of a Nia1 promoter (21-282), this designer starch-synthesis iRNA gene is designed to be expressed only when needed to enhance photobiological butanol production in the presence of its specific inducer, nitrate (NO₃), which can be added into the culture medium as a fertilizer for induction of the designer organisms. The Starch-Synthase iRNA sequence (283-617) is designed to bind with the normal mRNA of the starch synthase gene, thus blocking its translation into a functional starch synthase. The inhibition of the starch/glycogen synthase activity at 16 in this manner is to channel more photosynthetic products of the Calvin cycle into the Calvin-cycle-branched butanol-production pathway(s) such as the glyceraldehydes-3-phosphate-branched butanol-production pathway 01-12 as illustrated in FIG. 1.

[0124] SEQ ID NO: 28 presents example 28 for a designer HydA1-promoter-controlled Starch-Synthase-iRNA DNA construct (1328 bp) that includes a PCR FD primer (sequence 1-20), a 282-bp HydA1 promoter (21-302), a designer Starch-Synthase iRNA sequence (303-1085), a 223-bp RbcS2 terminator (1086-1308), and a PCR RE primer (1309-1328). The designer Starch-Synthase-iRNA sequence (303-1085) comprises of: a 300-bp sense fragment (303-602) selected from the first 300-bp unique coding sequence of a Chlamydomonas reinhardtii starch synthase mRNA sequence (GenBank: AF026422), a 183-bp designer intron-like loop (603-785), and a 300-bp antisense sequence (786-1085) complement to the first 300-bp coding sequence of a Chlamydomonas reinhardtii starch-synthase-mRNA sequence (GenBank: AF026422). This designer Starch-Synthase-iRNA sequence (303-1085) is designed to inhibit the synthesis of starch synthase by the following two mechanisms. First, the 300-bp antisense complement iRNA sequence (corresponding to DNA sequence 786-1085) binds with the normal mRNA of the starch synthase gene, thus blocking its translation into a functional starch synthase. Second, the 300-bp antisense complement iRNA sequence (corresponding to DNA sequence 786-1085) can also bind with the 300-bp sense counterpart (corresponding to DNA sequence 303-602) in the same designer iRNA molecule, forming a hairpin-like double-stranded RNA structure with the 183-bp designer intron-like sequence (603-785) as a loop. Experimental studies have shown that this type of hairpin-like double-stranded RNA can also trigger post-transcriptional gene silencing (Fuhrmann, Stahlberg, Govorunova, Rank and Hegemann (2001) Journal of Cell Science 114:3857-3863). Because of the use of a HydA1 promoter (21-302), this designer starch-synthesis-iRNA gene is designed to be expressed only under anaerobic conditions when needed to enhance photobiological butanol production by channeling more photosynthetic products of the Calvin cycle into the butanol-production pathway(s) such as 01-12, 03-12, and/or 20-33 as illustrated in FIG. 1.

### Designer Starch-Degradation and Glycolysis Genes

[0125] In yet another embodiment of the present invention, the photobiological butanol production is enhanced by incorporating an additional set of designer genes (FIG. 2D) that can facilitate starch/glycogen degradation and glycolysis in combination with the designer butanol-production gene(s) (FIG. 2A). Such additional designer genes for starch degradation include, for example, genes coding for 17: amylase, starch phosphorylase, hexokinase, phosphoglucomutase, and for 18: glucose-phosphate-isomerase (G-P-isomerase) as illustrated in FIG. 1. The designer glycolysis genes encode chloroplast-targeted glycolysis enzymes: glucosephosphate isomerase 18, phosphofructose kinase 19, aldolase 20, triose phosphate isomerase 21, glyceraldehyde-3-phosphate dehydrogenase 22, phosphoglycerate kinase 23, phosphoglycerate mutase 24, enolase 25, and pyruvate kinase 26. The designer starch-degradation and glycolysis genes in combination with any of the butanol-production pathways shown in FIG. 1 can form additional pathway(s) from starch/glycogen to butanol (17-33). Consequently, co-expression of the designer starch-degradation and glycolysis genes with the butanol-production-pathway genes can enhance photobiological production of butanol as well. Therefore, this embodiment represents another approach to tame the Calvin cycle for enhanced photobiological production of butanol. In this case, some of the Calvin-cycle products flow through the starch synthesis pathway (13-16) followed by the starch/glycogen-to-butanol pathway (17-33) as shown in FIG. 1. In this case, starch/glycogen acts as a transient storage pool of the Calvin-cycle products before they can be converted to butanol. This mechanism can be quite useful in maximizing the butanol-production yield in certain cases. For example, at high sunlight intensity such as around noon, the rate of Calvin-cycle photosynthetic CO₂ fixation can be so high that may exceed the maximal rate capacity of a butanol-production pathway(s); use of the starch-synthesis mechanism allows temporary storage of the excess photosynthetic products to be used later for butanol production as well.

[0126] FIG. 1 also illustrates the use of a designer starch/glycogen-to-butanol pathway with designer enzymes (as labeled from 17 to 33) in combination with a Calvin-cycle-branched designer butanol-production pathway(s) such as the glyceraldehydes-3-phosphate-branched butanol-production pathway 01-12 for enhanced photobiological butanol production. Similar to the benefits of using the Calvin-cycle-branched designer butanol-production pathways, the use of the designer starch/glycogen-to-butanol pathway (17-33) can also help to convert the photosynthetic products to butanol before the sugars could be converted into other complicated biomolecules such as lignocellulosic biomasses which cannot be readily used by the biorefinery industries. Therefore, appropriate use of the Calvin-cycle-branched designer butanol-production pathway(s) (such as 01-12, 03-12, and/or 20-33) and/or the designer starch/glycogen-to-butanol pathway (17-33) may represent revolutionary inter alia technologies that can effectively bypass the bottleneck problems of the current biomass technology including the “lignocellulosic recalcitrance” problem.

[0127] Another feature is that a Calvin-cycle-branched designer butanol-production pathway activity (such as 01-12, 03-12, and/or 20-33) can occur predominantly during the days when there is light because it uses an intermediate product of the Calvin cycle which requires supplies of reducing power (NADPH) and energy (ATP) generated by the photosynthetic water splitting and the light-driven proton-translocation-coupled electron transport process through the thylakoid membrane system. The designer starch/glycogen-to-butanol pathway (17-33) which can use the surplus sugar that has been stored as starch/glycogen during photosynthesis can operate not only during the days, but also at nights. Consequently, the use of a Calvin-cycle-branched designer butanol-production pathway (such as 01-12, 03-12, and/or 20-33) together with a designer starch/glycogen-to-butanol pathway(s) (17-33) as illustrated in FIG. 1 enables production of butanol both during the days and at nights.

[0128] Because the expression for both the designer starch/glycogen-to-butanol pathway(s) and the Calvin-cycle-branched designer butanol-production pathway(s) is controlled by the use of an inducible promoter such as an anaerobic hydrogenase promoter, this type of designer organisms is also able to grow photoautotrophically under aerobic (normal) conditions. When the designer photosynthetic organisms are grown and ready for photobiological butanol production, the cells are then placed under the specific inducing conditions such as under anaerobic conditions [or an ammonium-to-nitrate fertilizer use shift, if designer Nia1/nirA promoter-controlled butanol-production pathway(s) is used] for enhanced butanol production, as shown in FIGS. 1 and 3.

[0129] Examples of designer starch (glycogen)-degradation genes are shown in SEQ ID NO: 29-33 listed. Briefly, SEQ ID NO:29 presents example 29 for a designer Amylase DNA construct (1889 bp) that includes a PCR FD primer (sequence 1-20), a 2×84-bp NR promoter (21-188), a 9-bp Xho I NdeI site (189-197), a 135-bp RbcS2 transit peptide (198-332), an Amylase-encoding sequence (333-1616) selected and modified from a Barley alpha-amylase (GenBank: J04202A my46 expression tested in aleurone cells), a 21-bp Lumio-tag sequence (1617-1637), a 9-bp XbaI site (1638-1646), a 223-bp RbcS2 terminator (1647-1869), and a PCR RE primer (1870-1889).

[0130] SEQ ID NO: 30 presents example 30 for a designer Starch-Phosphorylase DNA construct (3089 bp) that includes a PCR FD primer (sequence 1-20), a 2×84-bp NR promoter (21-188), a 135-bp RbcS2 transit peptide (189-323), a Starch Phosphorylase-encoding sequence (324-2846) selected and modified from a Citrus root starch-phosphorylase sequence (GenBank: AY098895, expression tested in citrus root), a 223-bp RbcS2 terminator (2847-3069), and a PCR RE primer (3070-3089).

[0131] SEQ ID NO: 31 presents example 31 for a designer Hexose-Kinase DNA construct (1949 bp) that includes a PCR FD primer (sequence 1-20), a 2×84-bp NR promoter (21-188), a 135-bp RbcS2 transit peptide (189-323), a Hexose Kinase-encoding sequence (324-1706) selected and modified from Ajellomyces capsulatus hexokinase mRNA sequence (Genbank: XM_{—}001541513), a 223-bp RbcS2 terminator (1707-1929), and a PCR RE primer (1930-1949).

[0132] SEQ ID NO: 32 presents example 32 for a designer Phosphoglucomutase DNA construct (2249 bp) that includes a PCR FD primer (sequence 1-20), a 2×84-bp NR promoter (21-188), a 135-bp RbcS2 transit peptide (189-323), a Phosphoglucomutase-encoding sequence (324-2006) selected and modified from Pichia stipitis phosphoglucomutase sequence (GenBank: XM_{—}001383281), a 223-bp RbcS2 terminator (2007-2229), and a PCR RE primer (2230-2249).

[0133] SEQ ID NO: 33 presents example 33 for a designer Glucosephosphate-Isomerase DNA construct (2231 bp) that includes a PCR FD primer (sequence 1-20), a 2×84-bp NR promoter (21-188), a 135-bp RbcS2 transit peptide (189-323), a Glucosephosphate Isomerase-encoding sequence (324-1988) selected and modified from a S. cerevisiae phosphoglucoisomerase sequence (GenBank: M21696), a 223-bp RbcS2 terminator (1989-2211), and a PCR RE primer (2212-2231).

[0134] The designer starch-degradation genes such as those shown in SEQ ID NO: 29-33 can be selected for use in combination with various designer butanol-production-pathway genes for construction of various designer starch-degradation butanol-production pathways such as the pathways shown in FIG. 1. For example, the designer genes shown in SEQ ID NOS: 1-12, 24-26, and 29-33 can be selected for construction of a Nia1 promoter-controlled starch-to-butanol production pathway that comprises of the following designer enzymes: amylase, starch phosphorylase, hexokinase, phosphoglucomutase, glucosephosphate isomerase, phosphofructose kinase, fructose diphosphate aldolase, triose phosphate isomerase, glyceraldehyde-3-phosphate dehydrogenase, phosphoglycerate kinase, phosphoglycerate mutase, enolase, pyruvate kinase, pyruvate-NADP⁺ oxidoreductase (or pyruvate-ferredoxin oxidoreductase), thiolase, 3-hydroxybutyryl-CoA dehydrogenase, crotonase, butyryl-CoA dehydrogenase, butyraldehyde dehydrogenase, and butanol dehydrogenase. This starch/glycogen-to-butanol pathway 17-33 may be used alone and/or in combinations with other butanol-production pathway(s) such as the 3-phosphoglycerate-branched butanol-production pathway 03-12 as illustrated in FIG. 1.

### Distribution of Designer Butanol-Production Pathways Between Chloroplast and Cytoplasm

[0135] In yet another embodiment of the present invention, photobiological butanol productivity is enhanced by a selected distribution of the designer butanol-production pathway(s) between chloroplast and cytoplasm in a eukaryotic plant cell. That is, not all the designer butanol-production pathway(s) (FIG. 1) have to operate in the chloroplast; when needed, part of the designer butanol-production pathway(s) can operate in cytoplasm as well. For example, in one of the various embodiments, a significant part of the designer starch-to-butanol pathway activity from dihydroxyacetone phosphate to butanol (21-33) is designed to occur at the cytoplasm while the steps from starch to dihydroxyacetone phosphate (17-20) are in the chloroplast. In this example, the linkage between the chloroplast and cytoplasm parts of the designer pathway is accomplished by use of the triose phosphate-phosphate translocator, which facilitates translocation of dihydroxyacetone across the chloroplast membrane. By use of the triose phosphate-phosphate translocator, it also enables the glyceraldehyde-3-phospahte-branched designer butanol-production pathway to operate not only in chloroplast, but also in cytoplasm as well. The cytoplasm part of the designer butanol-production pathway can be constructed by use of designer butanol-production pathway genes (DNA constructs of FIG. 2A) with their chloroplast-targeting sequence omitted as shown in FIG. 2E.

Designer Oxyphotobacteria with Designer Butanol-Production Pathways in Cytoplasm

[0136] In prokaryotic photosynthetic organisms such as blue-green algae (oxyphotobacteria including cyanobacteria and oxychlorobacteria), which typically contain photosynthetic thylakoid membrane but no chloroplast structure, the Calvin cycle is located in the cytoplasm. In this special case, the entire designer butanol-production pathway(s) (FIG. 1) including (but not limited to) the glyceraldehyde-3-phosphate branched butanol-production pathway (01-12), the 3-phosphpglycerate-branched butanol-production pathway (03-12), the fructose-1,6-diphosphate-branched pathway (20-33), the fructose-6-phosphate-branched pathway (19-33), and the starch (or glycogen)-to-butanol pathways (17-33) are adjusted in design to operate with the Calvin cycle in the cytoplasm of a blue-green alga. The construction of the cytoplasm designer butanol-production pathways can be accomplished by use of designer butanol-production pathway genes (DNA construct of FIG. 2A) with their chloroplast-targeting sequence all omitted. When the chloroplast-targeting sequence is omitted in the designer DNA construct(s) as illustrated in FIG. 2E, the designer gene(s) is transcribed and translated into designer enzymes in the cytoplasm whereby conferring the designer butanol-production pathway(s). The designer gene(s) can be incorporated into the chromosomal and/or plasmid DNA in host blue-green algae (oxyphotobacteria including cyanobacteria and oxychlorobacteria) by using the techniques of gene transformation known to those skilled in the art. It is a preferred practice to integrate the designer genes through an integrative transformation into the chromosomal DNA that can usually provide better genetic stability for the designer genes. In oxyphotobacteria such as cyanobacteria, integrative transformation can be achieved through a process of homologous DNA double recombination into the host's chromosomal DNA using a designer DNA construct as illustrated in FIG. 2F, which typically, from the 5′ upstream to the 3′ downstream, consists of: recombination site 1, a designer butanol-production-pathway gene(s), and recombination site 2. This type of DNA constructs (FIG. 2F) can be delivered into oxyphotobacteria (blue-green algae) with a number of available genetic transformation techniques including electroporation, natural transformation, and/or conjugation. The transgenic designer organisms created from blue-green algae are also called designer blue-green algae (designer oxyphotobacteria including designer cyanobacteria and designer oxychlorobacteria).

[0137] Examples of designer oxyphotobacterial butanol-production-pathway genes are shown in SEQ ID NO: 34-45 listed. Briefly, SEQ ID NO:34 presents example 34 for a designer oxyphotobacterial Butanol Dehydrogenase DNA construct (1709 bp) that includes a PCR FD primer (sequence 1-20), a 400-bp nitrite reductase (nirA) promoter from Thermosynechococcus elongatus BP-1 (21-420), an enzyme-encoding sequence (421-1569) selected and modified from a Clostridium saccharoperbutylacetonicum Butanol Dehydrogenase sequence (AB257439), a 120-bp rbcS terminator from Thermosynechococcus elongatus BP-1 (1570-1689), and a PCR RE primer (1690-1709) at the 3′ end.

[0138] SEQ ID NO:35 presents example 35 for a designer oxyphotobacterial Butyraldehyde Dehydrogenase DNA construct (1967 bp) that includes a PCR FD primer (sequence 1-20), a 400-bp Thermosynechococcus elongatus BP-1 nitrite reductase nirA promoter (21-420), an enzyme-encoding sequence (421-1827) selected and modified from a Clostridium saccharoperbutylacetonicum Butyraldehyde Dehydrogenase sequence (AY251646), a 120-bp rbcS terminator from Thermosynechococcus (1828-1947), and a PCR RE primer (1948-1967).

[0139] SEQ ID NO:36 presents example 36 for a designer oxyphotobacterial Butyryl-CoA Dehydrogenase DNA construct (1602 bp) that includes a PCR FD primer (sequence 1-20), a 305-bp Thermosynechococcus elongatus BP-1 nitrate reductase promoter (21-325), a Butyryl-CoA Dehydrogenase encoding sequence (326-1422) selected/modified from the sequences of a Clostridium beijerinckii Butyryl-CoA Dehydrogenase (AF494018), a 120-bp Thermosynechococcus rbcS terminator (1423-1582), and a PCR RE primer (1583-1602).

[0140] SEQ ID NO:37 presents example 37 for a designer oxyphotobacterial Crotonase DNA construct (1248 bp) that includes a PCR FD primer (sequence 1-20), a 305-bp Thermosynechococcus elongatus BP-1 nitrate reductase promoter (21-325), a Crotonase-encoding sequence (326-1108) selected/modified from the sequences of a Clostridium beijerinckii Crotonase (GenBank: AF494018), 120-bp Thermosynechococcus elongatus BP-1 rbcS terminator (1109-1228), and a PCR RE primer (1229-1248).

[0141] SEQ ID NO:38 presents example 38 for a designer oxyphotobacterial 3-Hydroxybutyryl-CoA Dehydrogenase DNA construct (1311 bp) that include of a PCR FD primer (sequence 1-20), a 305-bp nirA promoter from (21-325), a 3-Hydroxybutyryl-CoA Dehydrogenase-encoding sequence (326-1171) selected/modified from a Clostridium beijerinckii 3-Hydroxybutyryl-CoA Dehydrogenase sequence (GenBank: AF494018), a 120-bp Thermosynechococcus rbcS terminator (1172-1291), and a PCR RE primer (1292-1311).

[0142] SEQ ID NO:39 presents example 39 for a designer oxyphotobacterial Thiolase DNA construct (1665 bp) that includes a PCR FD primer (sequence 1-20), a 305-bp Thermosynechococcus nirA promoter (21-325), a Thiolase-encoding sequence (326-1525) selected from a Butyrivibrio fibrisolvens Thiolase sequence (AB190764), a 120-bp Thermosynechococcus rbcS terminator (1526-1645), and a PCR RE primer (1646-1665).

[0143] SEQ ID NO:40 presents example 40 for a designer oxyphotobacterial Pyruvate-Ferredoxin Oxidoreductase DNA construct (4071 bp) that includes a PCR FD primer (sequence 1-20), a 305-bp nirA promoter from Thermosynechococcus elongatus BP-1 (21-325), a Pyruvate-Ferredoxin Oxidoreductase-encoding sequence (326-3931) selected/modified from the sequences of a Mastigamoeba balamuthi Pyruvate-ferredoxin oxidoreductase (GenBank: AY101767), a 120-bp rbcS terminator from Thermosynechococcus elongatus BP-1 (3932-4051), and a PCR RE primer (4052-4071).

[0144] SEQ ID NO:41 presents example 41 for a designer oxyphotobacterial Pyruvate Kinase DNA construct (1806 bp) that includes a PCR FD primer (sequence 1-20), a 305-bp nirA promoter from Thermosynechococcus (21-325), a pyruvate kinase-encoding sequence (326-1666) selected/modified from a Thermoproteus tenax pyruvate kinase (GenBank: AF065890), a 120-bp Thermosynechococcus rbcS terminator (1667-1786), and a PCR RE primer (1787-1806).

[0145] SEQ ID NO:42 presents example 42 for a designer oxyphotobacterial Enolase DNA construct (1696 bp) that includes a PCR FD primer (sequence 1-20), a 231-bp nirA promoter from Thermosynechococcus (21-251), a enolase-encoding sequence (252-1556) selected/modified from the sequences of a Chlamydomonas cytosolic enolase (GenBank: X66412, P31683), a 120-bp rbcS terminator from Thermosynechococcus (1557-1676), and a PCR RE primer (1677-1696).

[0146] SEQ ID NO:43 presents example 43 for a designer oxyphotobacterial Phosphoglycerate-Mutase DNA construct (2029 bp) that includes a PCR FD primer (sequence 1-20), a 231-bp nirA promoter from Thermosynechococcus elongatus BP-1 (21-251), a phosphoglycerate-mutase encoding sequence (252-1889) selected/modified from the sequences of a Pelotomaculum thermopropionicum SI phosphoglycerate mutase (GenBank: YP_{—}001213270), a 120-bp Thermosynechococcus rbcS terminator (1890-2009), and a PCR RE primer (2010-2029).

[0147] SEQ ID NO:44 presents example 44 for a designer oxyphotobacterial Phosphoglycerate Kinase DNA construct (1687 bp) that includes a PCR FD primer (sequence 1-20), a 231-bp nirA promoter from Thermosynechococcus elongatus BP-1 (21-251), a phosphoglycerate-kinase-encoding sequence (252-1433) selected from Pelotomaculum thermopropionicum SI phosphoglycerate kinase (BAF60903), a 234-bp Thermosynechococcus elongatus BP-1 rbcS terminator (1434-1667), and a PCR RE primer (1668-1687).

[0148] SEQ ID NO:45 presents example 45 for a designer oxyphotobacterial Glyceraldehyde-3-Phosphate Dehydrogenase DNA construct (1514 bp) that includes a PCR FD primer (sequence 1-20), a 305-bp Thermosynechococcus elongatus BP-1 nirA promoter (21-325), an enzyme-encoding sequence (326-1260) selected and modified from Blastochloris viridis NAD-dependent Glyceraldehyde-3-phosphate dehydrogenase (CAC80993), a 234-bp rbcS terminator from Thermosynechococcus elongatus BP-1 (1261-1494), and a PCR RE primer (1495-1514).

[0149] The designer oxyphotobacterial genes such as those shown in SEQ ID NO: 34-45 can be selected for use in full or in part, and/or in combination with various other designer butanol-production-pathway genes for construction of various designer oxyphotobacterial butanol-production pathways such as the pathways shown in FIG. 1. For example, the designer genes shown in SEQ ID NOS: 34-45 can be selected for construction of an oxyphotobacterial nirA promoter-controlled and glyceraldehyde-3-phosphate-branched butanol-production pathway (01-12) that comprises of the following designer enzymes: NAD-dependent glyceraldehyde-3-phosphate dehydrogenase 01, phosphoglycerate kinase 02, phosphoglycerate mutase 03, enolase 04, pyruvate kinase 05, pyruvate-ferredoxin oxidoreductase (or pyruvate-NADP⁺ oxidoreductase) 06, thiolase 07, 3-hydroxybutyryl-CoA dehydrogenase 08, crotonase 09, butyryl-CoA dehydrogenase 10, butyraldehyde dehydrogenase 11, and butanol dehydrogenase 12. Use of these designer oxyphotobacterial butanol-production-pathway genes (SEQ ID NOS: 34-45) in a thermophilic and/or thermotolerant cyanobacterium may represent a thermophilic and/or thermotolerant butanol-producing oxyphotobacterium. Fox example, use of these designer genes (SEQ ID NOS: 34-45) in a thermophilic/thermotolerant cyanobacterium such as Thermosynechococcus elongatus BP-1 may represent a designer thermophilic/thermotolerant butanol-producing cyanobacterium such as a designer butanol-producing Thermosynechococcus.

### Further Host Modifications to Help Ensure Biosafety

[0150] The present invention also provides biosafety-guarded photosynthetic biofuel (e.g., butanol and/or related higher alcohols) production methods based on cell-division-controllable designer transgenic plants (such as algae and oxyphotobacteria) or plant cells. For example, the cell-division-controllable designer photosynthetic organisms (FIG. 3) are created through use of a designer biosafety-control gene(s) (FIG. 2G) in conjunction with the designer butanol-production-pathway gene(s) (FIGS. 2A-2F) such that their cell division and mating function can be controllably stopped to provide better biosafety features.

[0151] In one of the various embodiments, a fundamental feature is that a designer cell-division-controllable photosynthetic organism (such as an alga, plant cell, or oxyphotobacterium) contains two key functions (FIG. 3A): a designer biosafety mechanism(s) and a designer biofuel-production pathway(s). As shown in FIG. 3B, the designer biosafety feature(s) is conferred by a number of mechanisms including: (1) the inducible insertion of designer proton-channels into cytoplasm membrane to permanently disable any cell division and mating capability, (2) the selective application of designer cell-division-cycle regulatory protein or interference RNA (iRNA) to permanently inhibit the cell division cycle and preferably keep the cell at the G₁ phase or G₀ state, and (3) the innovative use of a high-CO₂-requiring host photosynthetic organism for expression of the designer biofuel-production pathway(s). Examples of the designer biofuel-production pathway(s) include the designer butanol-production pathway(s), which work with the Calvin cycle to synthesize biofuel such as butanol directly from carbon dioxide (CO₂) and water (H₂O). The designer cell-division-control technology can help ensure biosafety in using the designer organisms for photosynthetic biofuel production. Accordingly, this embodiment provides, inter alia, biosafety-guarded methods for producing biofuel (e.g., butanol and/or related higher alcohols) based on a cell-division-controllable designer biofuel-producing alga, cyanobacterium, oxychlorobacterium, plant or plant cells.

[0152] In one of the various embodiments, a cell-division-controllable designer butanol-producing eukaryotic alga or plant cell is created by introducing a designer proton-channel gene (FIG. 2H) into a host alga or plant cell (FIG. 3B). SEQ ID NO: 46 presents example 46 for a detailed DNA construct of a designer Nia1-promoter-controlled proton-channel gene (609 bp) that includes a PCR FD primer (sequence 1-20), a 262-bp nitrate reductase Nia1 promoter (21-282), a Melittin proton-channel encoding sequence (283-366), a 223-bp RbcS2 terminator (367-589), and a PCR RE primer (590-609).

[0153] The expression of the designer proton-channel gene (FIG. 2H) is controlled by an inducible promoter such as the nitrate reductase (Nia1) promoter, which can also be used to control the expression of a designer biofuel-production-pathway gene(s). Therefore, before the expression of the designer gene(s) is induced, the designer organism can grow photoautotrophically using CO₂ as the carbon source and H₂O as the source of electrons just like wild-type organism. When the designer organism culture is grown and ready for photobiological production of biofuels, the cell culture is then placed under a specific inducing condition (such as by adding nitrate into the culture medium if the nitrate reductase (Nia1) promoter is used as an inducible promoter) to induce the expression of both the designer proton-channel gene and the designer biofuel-production-pathway gene(s). The expression of the proton-channel gene is designed to occur through its transcription in the nucleus and its translation in the cytosol. Because of the specific molecular design, the expressed proton channels are automatically inserted into the cytoplasm membrane, but leave the photosynthetic thylakoid membrane intact. The insertion of the designer proton channels into cytoplasm membrane collapses the proton gradient across the cytoplasm membrane so that the cell division and mating function are permanently disabled. However, the photosynthetic thylakoid membrane inside the chloroplast is kept intact (functional) so that the designer biofuel-production-pathway enzymes expressed into the stroma region can work with the Calvin cycle for photobiological production of biofuels from CO₂ and H₂O. That is, when both the designer proton-channel gene and the designer biofuel-production-pathway gene(s) are turned on, the designer organism becomes a non-reproducible cell for dedicated photosynthetic production of biofuels. Because the cell division and mating function are permanently disabled (killed) at this stage, the designer-organism culture is no longer a living matter except its catalytic function for photochemical conversion of CO₂ and H₂O into a biofuel. It will no longer be able to mate or exchange any genetic materials with any other cells, even if it somehow comes in contact with a wild-type cell as it would be the case of an accidental release into the environments.

[0154] According to one of the various embodiments, the nitrate reductase (Nia1) promoter or nitrite reductase (nirA) promoter is a preferred inducible promoter for use to control the expression of the designer genes. In the presence of ammonium (but not nitrate) in culture medium, for example, a designer organism with Nia1-promoter-controlled designer proton-channel gene and biofuel-production-pathway gene(s) can grow photoauotrophically using CO₂ as the carbon source and H₂O as the source of electrons just like a wild-type organism. When the designer organism culture is grown and ready for photobiological production of biofuels, the expression of both the designer proton-channel gene and the designer biofuel-production-pathway gene(s) can then be induced by adding some nitrate fertilizer into the culture medium. Nitrate is widely present in soils and nearly all surface water on Earth. Therefore, even if a Nia1-promoter-controlled designer organism is accidentally released into the natural environment, it will soon die since the nitrate in the environment will trig the expression of a Nia1-promoter-controlled designer proton-channel gene which inserts proton-channels into the cytoplasm membrane thereby killing the cell. That is, a designer photosynthetic organism with Nia1-promoter-controlled proton-channel gene is programmed to die as soon as it sees nitrate in the environment. This characteristic of cell-division-controllable designer organisms with Nia1-promoter-controlled proton-channel gene provides an added biosafety feature.

[0155] The art in constructing proton-channel gene (FIG. 2H) with a thylakoid-membrane targeting sequence has recently been disclosed [James W. Lee (2007). Designer proton-channel transgenic algae for photobiological hydrogen production, PCT International Publication Number: WO 2007/134340 A2]. In the present invention of creating a cell-division-controllable designer organism, the thylakoid-membrane-targeting sequence must be omitted in the proton-channel gene design. For example, the essential components of a Nia1-promoter-controlled designer proton-channel gene can simply be a Nia1 promoter linked with a proton-channel-encoding sequence (without any thylakoid-membrane-targeting sequence) so that the proton channel will insert into the cytoplasm membrane but not into the photosynthetic thylakoid membrane.

[0156] According to one of the various embodiments, it is a preferred practice to use the same inducible promoter such as the Nia1 promoter to control the expression of both the designer proton-channel gene and the designer biofuel-production pathway genes. In this way, the designer biofuel-production pathway(s) can be inducibly expressed simultaneously with the expression of the designer proton-channel gene that terminates certain cellular functions including cell division and mating.

[0157] In one of the various embodiments, an inducible promoter that can be used in this designer biosafety embodiment is selected from the group consisting of the hydrogenase promoters [HydA1 (Hyd1) and HydA2, accession number: AJ308413, AF289201, AY090770], the Cyc6 gene promoter, the Cpx1 gene promoter, the heat-shock protein promoter HSP70A, the CabII-1 gene (accession number M24072) promoter, the Ca1 gene (accession number P20507) promoter, the Ca2 gene (accession number P24258) promoter, the nitrate reductase (Nia1) promoter, the nitrite-reductase-gene (nirA) promoters, the bidirectional-hydrogenase-gene hox promoters, the light- and heat-responsive groE promoters, the Rubisco-operon rbcL promoters, the metal (zinc)-inducible smt promoter, the iron-responsive idiA promoter, the redox-responsive crhR promoter, the heat-shock-gene hspl 6.6 promoter, the small heat-shock protein (Hsp) promoter, the CO₂-responsive carbonic-anhydrase-gene promoters, the green/red light responsive cpcB2A2 promoter, the UV-light responsive lexA, recA and ruvB promoters, the nitrate-reductase-gene (narB) promoters, and combinations thereof.

[0158] In another embodiment, a cell-division-controllable designer photosynthetic organism is created by use of a carbonic anhydrase deficient mutant or a high-CO₂-requiring mutant as a host organism to create the designer biofuel-production organism. High-CO₂-requiring mutants that can be selected for use in this invention include (but not limited to): Chlamydomonas reinhardtii carbonic-anhydrase-deficient mutant12-1C (CC-1219 cal mt-), Chlamydomonas reinhardtii cia3 mutant (Plant Physiology 2003, 132:2267-2275), the high-CO₂-requiring mutant M3 of Synechococcus sp. Strain PCC 7942, or the carboxysome-deficient cells of Synechocystis sp. PCC 6803 (Plant biol (Stuttg) 2005, 7:342-347) that lacks the CO₂-concentrating mechanism can grow photoautotrophically only under elevated CO₂ concentration level such as 0.2-3% CO₂.

[0159] Under atmospheric CO₂ concentration level (380 ppm), the carbonic anhydrase deficient or high-CO₂-requiring mutants commonly cannot survive. Therefore, the key concept here is that a high-CO₂-requiring designer biofuel-production organism that lacks the CO₂ concentrating mechanism will be grown and used for photobiological production of biofuels always under an elevated CO₂ concentration level (0.2-5% CO₂) in a sealed bioreactor with CO₂ feeding. Such a designer transgenic organism cannot survive when it is exposed to an atmospheric CO₂ concentration level (380 ppm=0.038% CO₂) because its CO₂-concetrating mechanism (CCM) for effective photosynthetic CO₂ fixation has been impaired by the mutation. Even if such a designer organism is accidentally released into the natural environment, its cell will soon not be able to divide or mate, but die quickly of carbon starvation since it cannot effectively perform photosynthetic CO₂ fixation at the atmospheric CO₂ concentration (380 ppm). Therefore, use of such a high-CO₂-requiring mutant as a host organism for the genetic transformation of the designer biofuel-production-pathway gene(s) represents another way in creating the envisioned cell-division-controllable designer organisms for biosafety-guarded photobiological production of biofuels from CO₂ and H₂O. No designer proton-channel gene is required here.

[0160] In addition to the innovative use of a high-CO₂-requiring mutant, a highly thermophilic Thermosynechococcus elongatus (such as T. elongatus BP-1) which can grow inside a photobioreactor at a temperature as high as 55° C. but cannot grow or survive outside the bioreactor below 30° C. is used as a host organism as an additional approach to create biosafety-guarded transgenic photosynthetic organisms. Since this thermophilic organism can grow only inside the bioreactor at a temperature as high as 55° C. but cannot grow or survive in the natural environment outside the reactor below 30° C., use of this type of highly thermophilic organism as a host organism for genetic transformation with designer biofuel-production-pathway genes in creating transgenic photosynthetic organisms provides an assured biosafety-guarded feature in accordance of the present invention.

[0161] In another embodiment, a cell-division-controllable designer organism (FIG. 3B) is created by use of a designer cell-division-cycle regulatory gene as a biosafety-control gene (FIG. 2G) that can control the expression of the cell-division-cycle (cdc) genes in the host organism so that it can inducibly turn off its reproductive functions such as permanently shutting off the cell division and mating capability upon specific induction of the designer gene.

[0162] Biologically, it is the expression of the natural cdc genes that controls the cell growth and cell division cycle in cyanobacteria, algae, and higher plant cells. The most basic function of the cell cycle is to duplicate accurately the vast amount of DNA in the chromosomes during the S phase (S for synthesis) and then segregate the copies precisely into two genetically identical daughter cells during the M phase (M for mitosis). Mitosis begins typically with chromosome condensation: the duplicated DNA strands, packaged into elongated chromosomes, condense into the much-more compact chromosomes required for their segregation. The nuclear envelope then breaks down, and the replicated chromosomes, each consisting of a pair of sister chromatids, become attached to the microtubules of the mitotic spindle. As mitosis proceeds, the cell pauses briefly in a state called metaphase, when the chromosomes are aligned at the equator of the mitotic spindle, poised for segregation. The sudden segregation of sister chromatids marks the beginning of anaphase during which the chromosomes move to opposite poles of the spindle, where they decondense and reform intact nuclei. The cell is then pinched into two by cytoplasmic division (cytokinesis) and the cell division is then complete. Note, most cells require much more time to grow and double their mass of proteins and organelles than they require to replicate their DNA (the S phase) and divide (the M phase). Therefore, there are two gap phases: a G₁ phase between M phase and S phase, and a G2 phase between S phase and mitosis. As a result, the eukaryotic cell cycle is traditionally divided into four sequential phases: G₁, S, G₂, and M. Physiologically, the two gap phases also provide time for the cell to monitor the internal and external environment to ensure that conditions are suitable and preparation are complete before the cell commits itself to the major upheavals of S phase and mitosis. The G₁ phase is especially important in this aspect. Its length can vary greatly depending on external conditions and extracellular signals from other cells. If extracellular conditions are unfavorable, for example, cells delay progress through G₁ and may even enter a specialized resting state known as G₀ (G zero), in which they remain for days, weeks, or even for years before resuming proliferation. Indeed, many cells remain permanently in G₀ state until they die.

[0163] In one of the various embodiments, a designer gene(s) that encodes a designer cdc-regulatory protein or a specific cdc-iRNA is used to inducibly inhibit the expression of certain cdc gene(s) to stop cell division and disable the mating capability when the designer gene(s) is trigged by a specific inducing condition. When the cell-division-controllable designer culture is grown and ready for photosynthetic production of biofuels, for example, it is a preferred practice to induce the expression of a specific designer cdc-iRNA gene(s) along with induction of the designer biofuel-production-pathway gene(s) so that the cells will permanently halt at the G₁ phase or G₀ state. In this way, the grown designer-organism cells become perfect catalysts for photosynthetic production of biofuels from CO₂ and H₂O while their functions of cell division and mating are permanently shut off at the G₁ phase or G₀ state to help ensure biosafety.

[0164] Use of the biosafety embodiments with various designer biofuel-production-pathways genes listed in SEQ ID NOS: 1-45 (and 58-165) can create various biosafety-guarded photobiological biofuel producers (FIGS. 3A, 3B, and 3C). Note, SEQ ID NOS: 46 and 1-12 (examples 1-12) represent an example for a cell-division-controllable designer eukaryotic organism such as a cell-division-controllable designer alga (e.g., Chlamydomonas) that contains a designer Nia1-promoter-controlled proton-channel gene (SEQ ID NO: 46) and a set of designer Nia1-promoter-controlled butanol-production-pathway genes (SEQ ID NOS: 1-12). Because the designer proton-channel gene and the designer biofuel-production-pathway gene(s) are all controlled by the same Nia1-promoter sequences, they can be simultaneously expressed upon induction by adding nitrate fertilizer into the culture medium to provide the biosafety-guarded photosynthetic biofuel-producing capability as illustrated in FIG. 3B. Use of the designer Nia1-promoter-controlled butanol-production-pathway genes (SEQ ID NOS: 1-12) in a high CO₂-requiring host photosynthetic organism, such as Chlamydomonas reinhardtii carbonic-anhydrase-deficient mutant 12-1C (CC-1219 cal mt-) or Chlamydomonas reinhardtii cia3 mutant, represents another example in creating a designer cell-division-controllable photosynthetic organism to help ensure biosafety.

[0165] This designer biosafety feature may be useful to the production of other biofuels such as biodiesel, biohydrogen, ethanol, and intermediate products as well. For example, this biosafety embodiment in combination with a set of designer ethanol-production-pathway genes such as those shown SEQ ID NOS: 47-53 can represent a cell-division-controllable ethanol producer (FIG. 3C). Briefly, SEQ ID NO: 47 presents example 47 for a detailed DNA construct (1360 base pairs (bp)) of a nirA-promoter-controlled designer NAD-dependent Glyceraldehyde-3-Phosphate-Dehydrogenase gene including: a PCR FD primer (sequence 1-20), a 88-bp nirA promoter (21-108) selected from the Synechococcus sp. (freshwater cyanobacterium) nitrite-reductase-gene promoter sequence, an enzyme-encoding sequence (109-1032) selected and modified from a Cyanidium caldarium cytosolic NAD-dependent glyceraldehyde-3-phosphate-dehydrogenase sequence (GenBank accession number: CAC85917), a 308-bp Synechococcus rbcS terminator (1033-1340), and a PCR RE primer (1341-1360) at the 3′ end.

[0166] SEQ ID NO: 48 presents example 48 for a designer nirA-promoter-controlled Phosphoglycerate Kinase DNA construct (1621 bp) that includes a PCR FD primer (sequence 1-20), a 88-bp Synechococcus sp. strain PCC 7942 nitrite-reductase nirA promoter (21-108), a phosphoglycerate-kinase-encoding sequence (109-1293) selected from a Geobacillus kaustophilus phosphoglycerate-kinase sequence (GenBank: BAD77342), a 308-bp Synechococcus rbcS terminator (1294-1601), and a PCR RE primer (1602-1621).

[0167] SEQ ID NO: 49 presents example 49 for a designer nirA-promoter-controlled Phosphoglycerate-Mutase DNA construct (1990 bp) that includes a PCR FD primer (sequence 1-20), a 88-bp Synechococcus sp. strain PCC 7942 nitrite-reductase nirA promoter (21-108), a 9-bp Xho I NdeI site (109-117), a phosphoglycerate-mutase encoding sequence (118-1653) selected from the sequences of a Caldicellulosiruptor saccharolyticus DSM 8903 phosphoglycerate mutase (GenBank: ABP67536), a 9-bp XbaI site (1654-1662), a 308-bp Synechococcus sp. strain PCC 7942 rbcS terminator (1663-1970), and a PCR RE primer (1971-1990).

[0168] SEQ ID NO: 50 presents example 50 for a designer nirA-promoter-controlled Enolase DNA construct (1765 bp) that includes a PCR FD primer (sequence 1-20), a 88-bp Synechococcus sp. strain PCC 7942 nitrite reductase nirA promoter (21-108), a 9-bp Xho I NdeI site (109-117), an enolase-encoding sequence (118-1407) selected from the sequence of a Cyanothece sp. CCY0110 enolase (GenBank: ZP_{—}01727912), a 21-bp Lumio-tag-encoding sequence (1408-1428), a 9-bp XbaI site (1429-1437) containing a stop codon, a 308-bp Synechococcus rbcS terminator (1438-1745), and a PCR RE primer (1746-1765) at the 3′ end.

[0169] SEQ ID NO: 51 presents example 51 for a designer nirA-promoter-controlled Pyruvate Kinase DNA construct (1888 bp) that includes a PCR FD primer (sequence 1-20), a 88-bp Synechococcus nitrite reductase nirA promoter (21-108), a 9-bp Xho I NdeI site (109-117), a Pyruvate-Kinase-encoding sequence (118-1530) selected from a Selenomonas ruminantium Pyruvate Kinase sequence (GenBank: AB037182), a 21-bp Lumio-tag sequence (1531-1551), a 9-bp XbaI site (1552-1560), a 308-bp Synechococcus rbcS terminator (1561-1868), and a PCR RE primer (1869-1888).

[0170] SEQ ID NO: 52 presents example 52 for a designer nirA-promoter-controlled Pyruvate Decarboxylase DNA construct (2188 bp) that includes a PCR FD primer (sequence 1-20), a 88-bp Synechococcus nitrite reductase nirA promoter (21-108), a 9-bp Xho I NdeI site (109-117), a Pyruvate-Decarboxylase-encoding sequence (118-1830) selected from the sequences of a Pichia stipitis pyruvate-decarboxylase sequence (GenBank: XM_{—}001387668), a 21-bp Lumio-tag sequence (1831-1851), a 9-bp XbaI site (1852-1860), a 308-bp Synechococcus rbcS terminator (1861-2168), and a PCR RE primer (2169-2188) at the 3′ end.

[0171] SEQ ID NO: 53 presents example 53 for a nirA-promoter-controlled designer NAD(P)H-dependent Alcohol Dehydrogenase DNA construct (1510 bp) that includes a PCR FD primer (sequence 1-20), a 88-bp Synechococcus nitrite-reductase nirA promoter (21-108), a NAD(P)H dependent Alcohol-Dehydrogenase-encoding sequence (109-1161) selected/modified (its mitochondrial signal peptide sequence removed) from the sequence of a Kluyveromyces lactis alcohol dehydrogenase (ADH3) gene (GenBank: X62766), a 21-bp Lumio-tag sequence (1162-1182), a 308-bp Synechococcus rbcS terminator (1183-1490), and a PCR RE primer (1491-1510) at the 3′ end.

[0172] Note, SEQ ID NOS: 47-53 (DNA-construct examples 47-53) represent a set of designer nirA-promoter-controlled ethanol-production-pathway genes that can be used in oxyphotobacteria such as Synechococcus sp. strain PCC 7942. Use of this set of designer ethanol-production-pathway genes in a high-CO₂-requiring cyanobacterium such as the Synechococcus sp. Strain PCC 7942 mutant M3 represents another example of cell-division-controllable designer cyanobacterium for biosafety-guarded photosynthetic production of biofuels from CO₂ and H₂O.

### More on Designer Calvin-Cycle-Channeled Production of Butanol and Related Higher Alcohols

[0173] The present invention further discloses designer Calvin-cycle-channeled and photosynthetic-NADPH (reduced nicotinamide adenine dinucleotide phosphate)-enhanced pathways, associated designer DNA constructs (designer genes) and designer transgenic photosynthetic organisms for photobiological production of butanol and related higher alcohols from carbon dioxide and water. In this context throughout this specification as mentioned before, a “higher alcohol” or “related higher alcohol” refers to an alcohol that comprises at least four carbon atoms, including both straight and branched higher alcohols such as 1-butanol and 2-methyl-1-butanol. The Calvin-cycle-channeled and photosynthetic-NADPH-enhanced pathways are constructed with designer enzymes expressed through use of designer genes in host photosynthetic organisms such as algae and oxyphotobacteria (including cyanobacteria and oxychlorobacteria) organisms for photobiological production of butanol and related higher alcohols. The said butanol and related higher alcohols are selected from the group consisting of: 1-butanol, 2-methyl-1-butanol, isobutanol, 3-methyl-1-butanol, 1-hexanol, 1-octanol, 1-pentanol, 1-heptanol, 3-methyl-1-pentanol, 4-methyl-1-hexanol, 5-methyl-1-heptanol, 4-methyl-1-pentanol, 5-methyl-1-hexanol, and 6-methyl-1-heptanol. The designer photosynthetic organisms such as designer transgenic algae and oxyphotobacteria (including cyanobacteria and oxychlorobacteria) comprise designer Calvin-cycle-channeled and photosynthetic NADPH-enhanced pathway gene(s) and biosafety-guarding technology for enhanced photobiological production of butanol and related higher alcohols from carbon dioxide and water.

[0174] Photosynthetic water splitting and its associated proton gradient-coupled electron transport process generates chemical energy intermediate in the form of adenosine triphosphate (ATP) and reducing power in the form of reduced nicotinamide adenine dinucleotide phosphate (NADPH). However, certain butanol-related metabolic pathway enzymes such as the NADH-dependent butanol dehydrogenase (GenBank accession numbers: YP_{—}148778, N1³_{—}561774, AAG23613, ZP_{—}05082669, ADO12118, ADC48983) can use only reduced nicotinamide adenine dinucleotide (NADH) but not NADPH. Therefore, to achieve a true coupling of a designer pathway with the Calvin cycle for photosynthetic production of butanol and related higher alcohols, it is a preferred practice to use an effective NADPH/NADH conversion mechanism and/or NADPH-using enzyme(s) (such as NADPH-dependent enzymes) in construction of a compatible designer pathway(s) to couple with the photosynthesis/Calvin-cycle process in accordance with the present invention.

[0175] According to one of the various embodiments, a number of various designer Calvin-cycle-channeled pathways can be created by use of an NADPH/NADH conversion mechanism in combination with certain amino-acids-metabolic pathways for production of butanol and higher alcohols from carbon dioxide and water. The Calvin-cycle-channeled and photosynthetic-NADPH-enhanced pathways are constructed typically with designer enzymes that are selectively expressed through use of designer genes in a host photosynthetic organism such as a host alga or oxyphotobacterium for production of butanol and higher alcohols. A list of exemplary enzymes that can be selected for use in construction of the Calvin-cycle-channeled and photosynthetic-NADPH-enhanced pathways are presented in Table 1. As shown in FIGS. 4-10, the net results of the designer Calvin-cycle-channeled and photosynthetic NADPH-enhanced pathways in working with the Calvin cycle are production of butanol and related higher alcohols from carbon dioxide (CO₂) and water (H₂O) using photosynthetically generated ATP (Adenosine triphosphate) and NADPH (reduced nicotinamide adenine dinucleotide phosphate). A significant feature is the innovative utilization of an NADPH-dependent glyceraldehyde-3-phosphate dehydrogenase 34 and a nicotinamide adenine dinucleotide (NAD)-dependent glyceraldehyde-3-phosphate dehydrogenase 35 to serve as a NADPH/NADH conversion mechanism that can convert certain amount of photosynthetically generated NADPH to NADH which can then be used by NADH-requiring pathway enzymes such as an NADH-dependent alcohol dehydrogenase 43 (examples of its encoding gene with GenBank accession numbers are: BAB59540, CAA89136, NP_{—}148480) for production of butanol and higher alcohols.

[0176] More specifically, an NADPH-dependent glyceraldehyde-3-phosphate dehydrogenase 34 (e.g., GenBank accession numbers: ADC37857, ADC87332, YP_{—}003471459, ZP_{—}04395517, YP_{—}003287699, ZP_{—}07004478, ZP_{—}04399616) catalyzes the following reaction that uses NADPH in reducing 1,3-Diphosphoglycerate (1,3-DiPGA) to 3-Phosphoglyaldehyde (3-PGAld) and inorganic phosphate (Pi):

1,3-DiPGA+NADPH+H⁺→3-PGAld+NADP⁺+Pi [3]

Meanwhile, an NAD-dependent glyceraldehyde-3-phosphate dehydrogenase 35 (e.g., GenBank: ADM41489, YP_{—}003095198, ADC36961, ZP_{—}07003925, ACQ61431, YP_{—}002285269, ADN80469, ACI60574) catalyzes the oxidation of 3-PGAld by oxidized nicotinamide adenine dinucleotide (NAD⁺) back to 1,3-DiPGA:

3-PGAld+NAD⁺+Pi→1,3-DiPGA+NADH+H⁺ [4]

The net result of the enzymatic reactions [3] and [4] is the conversion of photosynthetically generated NADPH to NADH, which various NADH-requiring designer pathway enzymes such as NADH-dependent alcohol dehydrogenase 43 can use in producing butanol and related higher alcohols. When there is too much NADH, this NADPH/NADH conversion system can run also reversely to balance the supply of NADH and NADPH. Therefore, it is a preferred practice to innovatively utilize this NADPH/NADH conversion system under control of a designer switchable promoter such as nirA (or Nia1 for eukaryotic system) promoter when/if needed to achieve robust production of butanol and related higher alcohols. Various designer Calvin-cycle-channeled pathways in combination of a NADPH/NADH conversion mechanism with certain amino-acids-metabolism-related pathways for photobiological production of butanol and related higher alcohols are further described hereinbelow.

[0177] Table 1 lists examples of enzymes for construction of designer Calvin-cycle-linked pathways for production of butanol and related higher alcohols.

| | | GenBank Accession |
|---|---|---|
| | | Number, JGI Protein ID or |
| Enzyme/callout number | Source (Organism) | Citation |
| 03: | Oceanithermus profundus DSM 14977; | ADR35708; |
| Phosphoglycerate mutase | ‘Nostoc azollae’ 0708; | ADI65627, YP_003722750; |
| (phosphoglyceromutase) | Thermotoga lettingae TMO; | YP_001470593, ABV33529; |
| | Syntrophothermus lipocalidus DSM | ADI02216, YP_003702781; |
| | 12680; | |
| | Pelotomaculum thermopropionicum SI; | YP_001212148; |
| | Fervidobacterium nodosum Rt17-B1; | YP_001409891; |
| | Caldicellulosiruptor bescii DSM 6725; | YP_002573254, YP_002573195; |
| | Fervidobacterium nodosum Rt17-B1; | ABS60234; |
| | Thermotoga petrophila RKU-1; | ABQ47079, YP_001244998; |
| | Deferribacter desulfuricans SSM1; | YP_003496402, BAI80646; |
| | Cyanobium sp. PCC 7001; | ZP_05046421; |
| | Cyanothece sp. PCC 8802; | YP_003138980, YP_003138979; |
| | Chlamydomonas reinhardtii cytoplasm; | JGI Chlre2 protein ID 161689, |
| | Aspergillus fumigatus; Coccidioides | GenBank: AF268078; |
| | immitis; Leishmania braziliensis; | XM_747847; XM_749597; |
| | Ajellomyces capsulatus; | XM_001248115; XM_001569263; |
| | Monocercomonoides sp.; Aspergillus | XM_001539892; DQ665859; |
| | clavatus; Arabidopsis thaliana; Zea | XM_001270940; NM_117020; |
| | mays | M80912 |
| 04: | Syntrophothermus lipocalidus DSM | ADI02602, YP_003703167; |
| Enolase | 12680; ‘Nostoc azollae’ 0708; | ADI63801; |
| | Thermotoga petrophila RKU-1; | ABQ46079; |
| | Spirochaeta thermophila DSM 6192; | YP_003875216, ADN02943; |
| | Cyanothece sp. PCC 7822; | YP_003886899, ADN13624; |
| | Hydrogenobacter thermophilus TK-6; | YP_003432637, BAI69436; |
| | Thermosynechococcus elongatus BP-1, | BAC08209; |
| | Prochlorococcus marinus str. MIT | ABO16851; |
| | 9301; Synechococcus sp. WH 5701; | ZP_01083626; |
| | Trichodesmium erythraeum IMS101; | ABG51970; |
| | Anabaena variabilis ATCC 29413; | ABA23124; |
| | Nostoc sp. PCC 7120; | BAB75237; |
| | Chlamydomonas reinhardtii cytoplasm; | GenBank: X66412, P31683; |
| | Arabidopsis thaliana; | AK222035; DQ221745; |
| | Leishmania Mexicana; | XM_001528071; |
| | Lodderomyces elongisporus; | XM_001611873; |
| | Babesia bovis; | XM_001594215; |
| | Sclerotinia sclerotiorum; Pichia | XM_001483612; |
| | guilliermondii; Spirotrichonympha | AB221057; |
| | leidyi; | EF122486, U09450; |
| | Oryza sativa; | DQ845796; |
| | Trimastix pyriformis; | AB088633; |
| | Leuconostoc mesenteroides; | U82438; |
| | Davidiella tassiana; | D64113; |
| | Aspergillus oryzae; | U13799; |
| | Schizosaccharomyces pombe; | AY307449; |
| | Brassica napus; Zea mays | U17973; |
| 05: | Syntrophothermus lipocalidus DSM | ADI02459, YP_003703024; |
| Pyruvate kinase | 12680; Cyanothece sp. PCC 8802; | YP_002372431; |
| | Thermotoga lettingae TMO; | YP_001471580, ABV34516; |
| | Caldicellulosiruptor bescii DSM 6725; | YP_002573139; |
| | Geobacillus kaustophilus HTA426; | YP_148872; |
| | Thermosynechococcus elongatus BP-1; | NP_681306, BAC08068; |
| | Thermosipho melanesiensis BI429; | YP_001306168, ABR30783; |
| | Thermotoga petrophila RKU-1; | YP_001244312, ABQ46736; |
| | Caldicellulosiruptor saccharolyticus | ABP67416, YP_001180607; |
| | DSM 8903; Cyanothece sp. PCC 7425; | ACL43749, YP_002482578; |
| | Acaryochloris marina MBIC11017; | YP_001514814; |
| | Cyanothece sp. PCC 8801; | YP_003138017; |
| | Microcystis aeruginosa NIES-843; | YP_001655408; |
| | Cyanothece sp. PCC 7822; | YP_003890281; |
| | cyanobacterium UCYN-A; | YP_003422225; |
| | Arthrospira maxima CS-328; | ZP_03273505; |
| | Synechococcus sp. PCC 7335; | ZP_05035056; |
| | Chlamydomonas reinhardtii cytoplasm; | JGI Chlre3 protein ID 138105; |
| | Arabidopsis thaliana; Saccharomyces | GenBank: AK229638; AY949876, |
| | cerevisiae; Babesia bovis; Sclerotinia | AY949890, AY949888; |
| | sclerotiorum; Trichomonas vaginalis; | XM_001612087; XM_001594710; |
| | Pichia guilliermondii; Pichia stipitis; | XM_001329865; XM_001487289; |
| | Lodderomyces elongisporus; | XM_001384591; XM_001528210; |
| | Coccidioides immitis; Trimastix | XM_001240868; DQ845797; |
| | pyriformis; Glycine max (soybean) | L08632 |
| 06a: | Peranema trichophorum; | GenBank: EF114757; |
| Pyruvate-NADP⁺ | Euglena gracilis | AB021127, AJ278425; |
| oxidoreductase | | |
| 06b: | Mastigamoeba balamuthi; Desulfovibrio | GenBank: AY101767; Y09702; |
| Pyruvate-ferredoxin | africanus; Entamoeba histolytica; | U30149; XM_001582310, |
| oxidoreductase | Trichomonas vaginalis; | XM_001313670, XM_001321286, |
| | Cryptosporidium parvum; | XM_001307087, |
| | Cryptosporidium baileyi; Giardia | XM_001311860, XM_001314776, |
| | lamblia; Entamoeba histolytica; | XM_001307250; EF030517; |
| | Hydrogenobacter thermophilus; | EF030516; XM_764947; |
| | Clostridium pasteurianum; | XM_651927; AB042412; Y17727 |
| 07: | Butyrivibrio fibrisolvens; | GenBank: AB190764; |
| Thiolase or acetyl-CoA | Aeropyrum pernix K1 | NP_148577, NP_147604; |
| acetyltransferase (EC 2.3.1.9) | Bacillus subtilis; | KFC31530, KFC30638; |
| | butyrate-producing bacterium L2-50; | DQ987697; |
| | Thermoanaerobacterium | Z92974; |
| | thermosaccharolyticum; | EDV69072, EDV66074, |
| | Escherichia coli; | YP_490465, EDX40880; |
| | Clostridium acetobutylicum ATCC 824; | NP_149242; |
| | Clostridium beijerinckii NCIMB 8052; | ABR32599, ABR35750; |
| | Clostridium sp. DL-VIII; | EHI99795, EHI97451; |
| | Clostridium pasteurianum DSM 525; | KER14812, KER12654; |
| | Clostridium cellulovorans 743B; | ADL52748, ADL49976; |
| | Clostridium carboxidivorans P7; | ADO12109, EET85014; |
| | Clostridium haemolyticum NCTC 9693; | KEI18159; |
| | Clostridium novyi B str. ATCC 27606; | KEI13236; |
| | Clostridium aceticum; | KJF28669; |
| | Clostridium pasteurianum NRRL B-598; | ETD70327, ETD69108; |
| | Syntrophothermus lipocalidus DSM | ADI01070, ADI02832, |
| | 12680; | ADI02736, ADI01249; |
| | Sulfobacillus acidophilus DSM 10332; | AEW06715, AEW06150; |
| | Kyrpidia tusciae DSM 2912; | ADG07885, ADG05293; |
| | Geobacillus thermoleovorans; | AEV21117, AEV18833; |
| | Exiguobacterium sp. AT1b; | ACQ69746; |
| | Anoxybacillus sp. BCO1; | KHF30322; |
| | Thermotoga lettingae TMO; | ABV34112; |
| | Kosmotoga olearia TBF 19.5.1; | ACR79316; |
| | Fervidobacterium nodosum Rt17-B1; | ABS60179; |
| | Archaeoglobus sulfaticallidus PM70-1; | AGK61581, AGK61418; |
| | Methanothermobacter sp. CaT2; | BAM69958; |
| | Methanocella conradii HZ254; | YP_005381694, YP_005380728; |
| | Pyrococcus horikoshii OT3; | NP_142626; |
| | Bacillus methanolicus MGA3; | AIE61589; |
| | Geobacillus sp. JF8; | AGT33759, AGT33346; |
| | Thermus sp. CCB_US3_UF1; | AEV16506; |
| | Schleiferia thermophila str. Yellowstone; | KFD38991; |
| 08: | Clostridium beijerinckii; | GenBank: AF494018; |
| 3-Hydroxybutyryl-CoA | Butyrivibrio fibrisolvens; | AB190764; |
| dehydrogenase | Ajellomyces capsulatus; | XM_001537366; |
| | Aspergillus fumigatus; | XM_741533; |
| | Aspergillus clavatus; | XM_001274776; |
| | Neosartorya fischeri; | XM_001262361; |
| | Butyrate-producing bacterium L2-50; | DQ987697; |
| | Arabidopsis thaliana; | BT001208; |
| | Thermoanaerobacterium | Z92974, WP_013298133; |
| | thermosaccharolyticum; | |
| | Zobellia galactanivorans; | YP_004739166, CAZ98887; |
| | Clostridium pasteurianum NRRL B-598; | ETD65676, ETD67822; |
| | Clostridium carboxidivorans P7; | ADO12108; |
| | Pseudomonas batumici; | KIH82523 |
| 09: | Clostridium beijerinckii; | GenBank: AF494018; |
| Crotonase | Butyrivibrio fibrisolvens; | AB190764; |
| | Butyrate-producing bacterium L2-50; | DQ987697; |
| | Thermoanaerobacterium | Z92974, CAB07495, |
| | thermosaccharolyticum; | WP_013298137; |
| | Clostridium pasteurianum NRRL B-598; | ETD68658, ETD68657, |
| | Clostridium perfringens str. 13; | ETD66584; BAB79801; |
| | Geobacillus sp. JF8; | AGT32321, AGT32312; |
| | Thermoanaerobacter sp. YS13; | KHO61061; |
| 10: | Clostridium beijerinckii; | GenBank: AF494018; |
| Butyryl-CoA dehydrogenase | Butyrivibrio fibrisolvens; | AB190764; |
| or Trans-enoyl-CoA | Butyrate-producing bacterium L2-50; | DQ987697; |
| reductase (Ter) (EC1.1.1.36) | Thermoanaerobacterium | Z92974; |
| | thermosaccharolyticum; | |
| | Treponema denticola ATCC 35405; | 4GGO_A, 4GGP_D, 4FBG_P, |
| | Treponema denticola ATCC 35405; | 4FBG_O; NP_971211; |
| | Treponema denticola; | WP_002669849, WP_002681770; |
| | uncultured bacterium; | AFH02847; |
| | Flavobacterium johnsoniae; | WP_011921530, ABQ03048; |
| | Clostridium pasteurianum NRRL B-598; | ETD66981; |
| | Fibrobacter succinogenes; | WP_014545506, ACX74348; |
| 11: | Clostridium saccharoperbutylacetonicu; | GenBank: AY251646, AAP42563; |
| Butyraldehyde | Clostridium acetobutylicum ATCC 824 | YP_009076789, AAK09379; |
| dehydrogenase or | | |
| aldehyde/alcohol | | |
| dehydrogenase (AdhE2) | | |
| 12a: | Geobacillus kaustophilus HTA426; | YP_148778, BAD77210; |
| NADH-dependent Butanol | Clostridium perfringens str. 13; | NP_561774, BAB80564; |
| dehydrogenase | Carboxydothermus hydrogenoformans; | AAG23613; |
| | Pseudovibrio sp. JE062; | ZP_05082669, EEA96294; |
| | Clostridium carboxidivorans P7; | ADO12118; |
| | Bacillus pseudofirmus OF4; | ADC48983, YP_003425875; |
| | Oceanobacillus iheyensis HTE831; | NP_693981, BAC15015; |
| | Slackia exigua ATCC 700122; | ZP_06159969, EEZ61452; |
| | Fusobacterium ulcerans ATCC 49185; | ZP_05633940; |
| | Listeria monocytogenes FSL J1-175; | ZP_05388801; |
| | Chlorobium chlorochromatii CaD3; | ABB28961; |
| | Clostridium perfringens D str. JGS1721; | ZP_02952811; |
| | Clostridium perfringens NCTC | ZP_02641897; |
| | 8239; Clostridium perfringens CPE str. | ZP_02638128; |
| | F4969; Clostridium perfringens B str. | ZP_02634798; |
| | ATCC 3626; | EDT24774; |
| | Clostridium botulinum NCTC 2916; | ZP_02614964, ZP_02614746; |
| | Nostoc sp. PCC 7120; | NP_488606, BAB76265; |
| | Clostridium botulinum CFSAN001628; | EKX78737; |
| | Wolinella succinogenes; | CAE10066; |
| 12b: | Clostridium perfringens str. 13; | NP_562172, BAB80962; |
| NADPH-dependent Butanol | Clostridium saccharobutylicum; | AAA83520; |
| dehydrogenase | Subdoligranulum variabile DSM 15176; | EFB77036; |
| | Butyrivibrio crossotus DSM 2876; | EFF67629, ZP_05792927; |
| | Oribacterium sp. oral taxon 078 str. | ZP_06597730, EFE92592; |
| | F0262; Clostridium sp. M62/1; | EFE12215, ZP_06346636; |
| | Clostridium hathewayi DSM 13479; | EFC98086, ZP_06115415; |
| | Subdoligranulum variabile DSM 15176; | ZP_05979561; |
| | Faecalibacterium prausnitzii A2-165; | ZP_05615704, EEU95840; |
| | Blautia hansenii DSM 20583; | ZP_05853889, EEX22072; |
| | Roseburia intestinalis L1-82, | ZP_04745071, EEU99657; |
| | Bacillus cereus Rock3-28; | ZP_04236939, EEL31374; |
| | Eubacterium rectale ATCC 33656; | YP_002938098, ACR75964; |
| | Clostridium sp. HGF2; | EFR36834; |
| | Atopobium rimae ATCC 49626; | ZP_03568088; |
| | Clostridium perfringens D str. JGS1721; | ZP_02952006; |
| | Clostridium perfringens NCTC 8239; | ZP_02642725; |
| | Clostridium butyricum 5521; | ZP_02950013, ZP_02950012; |
| | Clostridium carboxidivorans P7; | ZP_06856327; |
| | Clostridium botulinum E3 str. Alaska | YP_001922606, YP_001922335, |
| | E43; Clostridium novyi NT; | ACD52989; YP_878939; |
| | Clostridium botulinum B str. Eklund; | YP_001887401; |
| | Thermococcus sp. AM4; | EEB74113; |
| | Fusobacterium sp. D11; | EFD81183; |
| | Anaerococcus vaginalis ATCC 51170; | ZP_05473100, EEU12061; |
| | Clostridium perfringens; | EDT27639, EDT24389; |
| | Anaerostipes caccae DSM 14662; | EDR98218; |
| | Amphritea japonica; | WP_026340117; |
| | Aquabacterium sp. NJ1; | KGM39209; |
| 13: | Chlamydomonas reinhardtii; | GenBank: AF026422, AF026421, |
| Starch synthase | Phaseolus vulgaris; | DQ019314, AF433156; |
| | Oryza sativa; | AB293998; D16202, AB115917, |
| | Arabidopsis thaliana; | AY299404; AF121673, |
| | Colocasia esculenta; | AK226881; NM_101044; |
| | Amaranthus cruentus; | AY225862, AY142712; |
| | Parachlorella kessleri; | DQ178026; AB232549; |
| | Triticum aestivum; | Y16340; |
| | Sorghum bicolor; | AF168786; |
| | Astragalus membranaceus; | AF097922; |
| | Perilla frutescens; | AF210699; |
| | Zea mays; | AF019297; |
| | Ipomoea batatas | AF068834; |
| 14: | Arabidopsis thaliana; Zea mays; | GenBank: NM_127730, |
| Glucose-1-phosphate | Chlamydia trachomatis; Solanum | NM_124205, NM_121927, |
| adenylyltransferase | tuberosum (potato); Shigella flexneri; | AY059862; EF694839, |
| | Lycopersicon esculentum | EF694838; AF087165; P55242; |
| | | NP_709206; T07674 |
| 15: | Oryza sativa plastid; Ajellomyces | GenBank: AC105932, AF455812; |
| Phosphoglucomutase | capsulatus; Pichia stipitis; | XM_001536436; XM_001383281; |
| | Lodderomyces elongisporus; Aspergillus | XM_001527445; XM_749345; |
| | fumigatus; Arabidopsis thaliana; | NM_124561, NM_180508, |
| | Populus tomentosa; Oryza sativa; Zea | AY128901; AY479974; |
| | mays | AF455812; U89342, U89341 |
| 16: | Staphylococcus carnosus subsp. | YP_002633806, CAL27621; |
| Hexose-phosphate-isomerase | carnosus TM300; | |
| 17: | Hordeum vulgare aleurone cells; | GenBank: J04202; |
| Alpha-amylase; | Trichomonas vaginalis; Phanerochaete | XM_001319100; EF143986; |
| | chrysosporium; Chlamydomonas | AY324649; NM_129551; |
| | reinhardtii; Arabidopsis thaliana; | X07896; |
| | Dictyoglomus thermophilum heat-stable | |
| | amylase gene; | |
| Beta-amylase; | Arabidopsis thaliana; Hordeum vulgare; | GenBank: NM_113297; D21349; |
| | Musa acuminate; | DQ166026; |
| Starch phosphorylase; | Citrus hybrid cultivar root; Solanum | GenBank: AY098895; P53535; |
| | tuberosum chloroplast; Arabidopsis | NM_113857, NM_114564; |
| | thaliana; Triticum aestivum; Ipomoea | AF275551; M64362 |
| | batatas; | |
| 18: | Chlamydomonas reinhardtii; | JGI Chlre3 protein ID 135202; |
| Glucose-phosphate (glucose- | Saccharomyces cerevisiae; Pichia | GenBank: M21696; |
| 6-phosphate) isomerase | stipitis; Ajellomyces capsulatus; | XM_001385873; |
| | Spinacia oleracea cytosol; Oryza sativa | XM_001537043; T09154; |
| | cytoplasm; Arabidopsis thaliana; Zea | P42862; NM_123638, |
| | mays | NM_118595; U17225 |
| 19: | Chlamydomonas reinhardtii; | JGI Chlre2 protein ID 159495; |
| Phosphofructose kinase | Arabidopsis thaliana; Ajellomyces | GenBank: NM_001037043, |
| | capsulatus; Yarrowia lipolytica; Pichia | NM_179694, NM_119066, |
| | stipitis; Dictyostelium discoideum; | NM_125551; XM_001537193; |
| | Tetrahymena thermophila; | AY142710; XM_001382359, |
| | Trypanosoma brucei; | XM_001383014; XM_639070; |
| | Plasmodium falciparum; | XM_001017610; XM_838827; |
| | Spinacia oleracea; | XM_001347929; DQ437575; |
| 20: | Chlamydomonas reinhardtii chloroplast; | GenBank: X69969; AF308587; |
| Fructose-diphosphate | Fragaria x ananassa cytoplasm; Homo | NM_005165; XM_001609195; |
| aldolase | sapiens; Babesia bovis; Trichomonas | XM_001312327, XM_001312338; |
| | vaginalis; Pichia stipitis; Arabidopsis | XM_001387466; NM_120057, |
| | thaliana | NM_001036644 |
| 21: | Arabidopsis thaliana; Chlamydomonas | GenBank: NM_127687, |
| Triose phosphate isomerase | reinhardtii; Sclerotinia sclerotiorum; | AF247559; AY742323; |
| | Chlorella pyrenoidosa; Pichia | XM_001587391; AB240149; |
| | guilliermondii; Euglena intermedia; | XM_001485684; DQ459379; |
| | Euglena longa; Spinacia oleracea; | AY742325; L36387; AY438596; |
| | Solanum chacoense; Hordeum vulgare; | U83414; EF575877; |
| | Oryza sativa | |
| 34: | Staphylococcus aureus 04-02981; | ADC37857; |
| NADPH-dependent | Staphylococcus lugdunensis; | ADC87332; |
| Glyceraldehyde-3-phosphate | Staphylococcus lugdunensis HKU09; | YP_003471459; |
| dehydrogenase | Vibrio cholerae BX 330286; | ZP_04395517; |
| | Vibrio sp. Ex25; | YP_003287699; |
| | Pseudomonas savastanoi pv.; | ZP_07004478, EFI00105; |
| | Vibrio cholerae B33; | ZP_04399616 |
| | Grimontia hollisae CIP 101886; | ZP_06052988, EEY71738; |
| | Vibrio mimicus MB-451, | ZP_06041160; |
| | Vibrio coralliilyticus ATCC BAA-450; | ZP_05886203; |
| | Vibrio cholerae MJ-1236; | YP_002876243; |
| | Zea mays cytosolic NADP dependent; | NP_001105589; |
| | Apium graveolens; | AAF08296; |
| | Vibrio cholerae B33; | EEO17521; |
| | Vibrio cholerae TMA 21; | EEO13209; |
| | Vibrio cholerae bv. albensis VL426; | EEO01829; |
| | Vibrio orientalis CIP 102891; | ZP_05943395; |
| | Vibrio cholerae MJ-1236; | ACQ62447; |
| | Vibrio cholerae CT 5369-93; | ZP_06049761; |
| | Vibrio sp. RC586; | ZP_06079970; |
| | Vibrio furnissii CIP 102972; | ZP_05878983; |
| | Vibrio metschnikovii CIP 69.14; | ZP_05883187; |
| 35: | Edwardsiella tarda FL6-60; | ADM41489; |
| NAD-dependent | Flavobacteriaceae bacterium 3519-10; | YP_003095198; |
| Glyceraldehyde-3-phosphate | Staphylococcus aureus 04-02981; | ADC36961; |
| dehydrogenase | Pseudomonas savastanoi pv. savastanoi | ZP_07003925; |
| | NCPPB 3335; | |
| | Vibrio cholerae MJ-1236; | ACQ61431, YP_002878104; |
| | Streptococcus pyogenes NZ131; | YP_002285269; |
| | Helicobacter pylori 908; | ADN80469; |
| | Streptococcus pyogenes NZ131; | ACI60574; |
| | Staphylococcus lugdunensis HKU09; | ADC88142; |
| | Vibrio sp. Ex25; | ACY51070; |
| | Stenotrophomonas chelatiphaga; | ADK67090; |
| | Pseudoxanthomonas dokdonensis; | ADK67075; |
| | Stenotrophomonas maltophilia; | ADK67085, ACH90636; |
| | Vibrio cholerae B33; Photobacterium | ZP_04401333; |
| | damselae subsp. damselae CIP 102761; | ZP_06155532; |
| | Vibrio sp. RC586; | ZP_06080908; |
| | Grimontia hollisae CIP 101886; | ZP_06052393; |
| | Vibrio furnissii CIP 102972; | EEX42220; |
| | Acidithiobacillus caldus ATCC 51756; | ZP_05292346; |
| | Nostoc sp. PCC 7120; | CAC41000; |
| | Vibrio cholerae BX 330286; | EEO22474; |
| | Vibrio cholerae TMA 21; | EEO13042; |
| | Nostoc sp. PCC 7120; | CAC41000; |
| | Pinus sylvestris; | CAA04942; |
| | Cheilanthes yavapensis; | ACO58643, ACO58642; |
| | Cheilanthes wootonii; | ACO58624, ACO58623; |
| | Astrolepis laevis; | CBH41484, CBH41483; |
| 36: | Hydrogenobacter thermophilus TK-6; | YP_003433013, ADO45737, |
| (R)-Citramalate synthase | Geobacter bemidjiensis Bem; | BAI69812; |
| (EC 2.3.1.182) | Geobacter sulfurreducens KN400; | ACH38284; |
| | Methanobrevibacter ruminantium M1; | ADI84633; |
| | Leptospira biflexa serovar Patoc strain | CP001719; |
| | ‘Patoc 1 (Paris)’; Leptospira biflexa | ABK13757; |
| | serovar Monteralerio; Leptospira | ABK13756; |
| | interrogans serovar Australis; | ABK13755; |
| | Leptospira interrogans serovar | ABK13753; |
| | Pomona; Leptospira interrogans | ABK13754; |
| | serovar Autumnalis; Leptospira | ABK13752; |
| | interrogans serovar Pyrogenes; | ABK13751; |
| | Leptospira interrogans serovar | ABK13750; |
| | Canicola; | ABK13749; |
| | Leptospira interrogans serovar Lai; | ADL11763, |
| | Acetohalobium arabaticum DSM 5501; | YP_003998693; |
| | Leadbetterella byssophila DSM 17132; | CBK66631; |
| | Bacteroides xylanisolvens XB1A; | EFQ72644; |
| | Mucilaginibacter paludis DSM 18603; | ADE82919; |
| | Prevotella ruminicola 23; | ABQ04337; |
| | Flavobacterium johnsoniae UW101; | ZP_06244204, |
| | Victivallis vadensis ATCC BAA-548; | EFA99692; |
| | Prevotella copri DSM 18205; | EFB36404, ZP_06251228; |
| | Alistipes shahii WAL 8301; | CBK64953; |
| | Methylobacter tundripaludum SV96; | ZP_07654184; |
| | Methanosarcina mazei Go1; | NP_632695; |
| 37: | Eubacterium eligens ATCC 27750 | YP_002930810, YP_002930809; |
| (R)-2-Methylmalate | Methanocaldococcus jannaschii; | P81291; |
| dehydratase (large and small | Sebaldella termitidis ATCC 33386; | ACZ06998; |
| subunits) | Eubacterium eligens ATCC 27750; | ACR72362, ACR72361, |
| (EC 4.2.1.35) | | ACR72363, YP_002930808; |
| 38: | Thermotoga petrophila RKU-1; | ABQ46641, ABQ46640; |
| 3-Isopropylmalate | Cyanothece sp. PCC 7822; | YP_003886427, YP_003889452; |
| dehydratase (large + small | Syntrophothermus lipocalidus DSM | ADI02900, ADI02899, |
| subunits) | 12680; | YP_003703465, ADI01294; |
| (EC 4.2.1.33) | Caldicellulosiruptor saccharolyticus | ABP66933, ABP66934; |
| | DSM 8903; | |
| | Pelotomaculum thermopropionicum SI, | YP_001211082, YP_001211083; |
| | Caldicellulosiruptor bescii DSM 6725; | YP_002573950, YP_002573949; |
| | Caldicellulosiruptor saccharolyticus | YP_001180124, YP_001180125; |
| | DSM 8903; | leuC, ECK0074, JW0071; |
| | E. coli; | leuD, ECK0073, JW0070; |
| | Spirochaeta thermophila DSM 6192; | YP_003875294, YP_003873373; |
| | Pelotomaculum thermopropionicum SI; | YP_001213069, YP_001213068; |
| | Hydrogenobacter thermophilus TK-6; | YP_003433547, YP_003432351; |
| | Deferribacter desulfuricans SSM1; | YP_003495505, YP_003495504; |
| | Anoxybacillus flavithermus WK1; | ACJ32977, ACJ32978; |
| | Thermosynechococcus elongatus BP-1; | BAC08461, BAC08786; |
| | Geobacillus kaustophilus HTA426; | BAD76941, BAD76940; |
| | Synechocystis sp. PCC 6803; | BAA18738, BAA18298; |
| | Chlamydomonas reinhardtii; | XP_001702135, XP_001696402; |
| 39: | Thermotoga petrophila RKU-1; | ABQ46392, YP_001243968; |
| 3-Isopropylmalate | Cyanothece sp. PCC 7822; | YP_003888480, ADN15205; |
| dehydrogenase | Thermosynechococcus elongatus BP-1; | BAC09152, NP_682390; |
| (EC 1.1.1.85) | Syntrophothermus lipocalidus DSM; | ADI02898, YP_003703463; |
| | Caldicellulosiruptor bescii DSM 6725; | ADQ78220; |
| | Paludibacter propionicigenes WB4; | YP_002573948; |
| | Leadbetterella byssophila DSM 17132; | YP_003998692; |
| | Caldicellulosiruptor saccharolyticus | ABP66935; |
| | DSM 8903; Thermus thermophilus; | AAA16706, YP_001180126; |
| | Pelotomaculum thermopropionicum SI; | YP_001211084; |
| | Geobacillus kaustophilus HTA426; | YP_148510, BAD76942; |
| | Hydrogenobacter thermophilus TK-6; | YP_003433176; |
| | Spirochaeta thermophila DSM 6192; | YP_003873639; |
| | Deferribacter desulfuricans SSM1; | YP_003495917; |
| | Anoxybacillus flavithermus WK1; | YP_002314961; |
| | Volvox carteri f. nagariensis; | XP_002955062, EFJ43816; |
| | Chlamydomonas reinhardtii; | XP_001701074, XP_001701073; |
| | Ostreococcus tauri; | XP_003083133; |
| 40: | Thermotoga petrophila RKU-1; | ABQ46395, YP_001243971; |
| 2-Isopropylmalate synthase | Cyanothece sp. PCC 7822; | YP_003890122, ADN16847; |
| (EC 2.3.3.13) | Cyanothece sp. PCC 8802; | ACU99797; |
| | Nostoc punctiforme PCC 73102; | ACC82459; |
| | Pelotomaculum thermopropionicum SI; | YP_001211081; |
| | Hydrogenobacter thermophilus TK-6; | YP_003432474, BAI69273; |
| | E. coli; Caldicellulosiruptor | NP_414616, AAC73185; |
| | saccharolyticus DSM 8903; | ABP66753, YP_001179944; |
| | Syntrophothermus lipocalidus DSM | YP_003703466, ADI02901; |
| | 12680; Geobacillus kaustophilus | YP_148511, BAD76943; |
| | HTA426; Caldicellulosiruptor bescii | YP_002572404; |
| | DSM 6725; Anoxybacillus flavithermus | YP_002314960, ACJ32975; |
| | WK1; Deferribacter desulfuricans | YP_003496874, BAI81118; |
| | SSM1; Thermosynechococcus elongatus | NP_682187, BAC08949; |
| | BP-1; Spirochaeta thermophila DSM | ADN03009, YP_003875282; |
| | 6192; Thermotoga lettingae TMO; | YP_001469896, ABV32832; |
| | Volvox carteri f. nagariensis; | XP_002945733, EFJ52728; |
| | Micromonas sp. RCC299; | ACO69978, XP_002508720; |
| | Micromonas pusilla CCMP1545; | XP_003063010, EEH52949; |
| | Chlamydomonas reinhardtii; | XP_001696603, EDP08580; |
| 41: | Geobacillus kaustophilus HTA426; | YP_148509, YP_148508; |
| isopropylmalate isomerase | Anabaena variabilis ATCC 29413; | YP_324467, YP_324466; |
| large/small subunits | Synechocystis sp. PCC 6803; | NP_442926, NP_441618; |
| (EC 4.2.1.33) | Anoxybacillus flavithermus WK1; | YP_002314962, YP_002314963; |
| | Thermosynechococcus elongatus BP-1; | NP_682024, NP_681699; |
| | Spirochaeta thermophila DSM 6192; | YP_003873372; |
| | Salmonella enterica subsp. enterica | CBG23133, CBG23132; |
| | serovar Typhimurium str. D23580; | |
| | Staphylococcus aureus A5937; | ZP_05702396; |
| | Francisella philomiragia subsp. | EET20545; |
| | philomiragia ATCC 25015; | AAA53236; |
| | Neisseria lactamica; Francisella | ABK88972; |
| | novicida U112; Staphylococcus aureus | EEV86047; |
| | A5937; Staphylococcus aureus subsp. | ZP_05607839; |
| | aureus 68-397; Fusobacterium sp. | EEO38992; |
| | 2_1_31; Francisella novicida GA99- | EDN35429; |
| | 3549; marine bacterium HP15; | ADP98363, ADP98362; |
| | Bacillus licheniformis ATCC 14580; | YP_092517, YP_092516; |
| | Rhodobacter sphaeroides 2.4.1; | YP_353947, YP_353945; |
| | Bordetella petrii DSM 12804; | YP_001631647, YP_001631646; |
| | Agrobacterium vitis S4; | YP_002551071, YP_002551071; |
| 42: | Lactococcus lactis; | AAS49166; |
| 2-keto acid decarboxylase | Lactococcus lactis subsp. lactis KF147; | ADA65057, YP_003353820; |
| (EC 4.1.1.72, etc) | Lactococcus lactis subsp. Lactis; | |
| | Kluyveromyces marxianus; | CAG34226; |
| | Kluyveromyces lactis; | AAA35267; |
| | Mycobacterium avium 104; | CAA59953; |
| | Mycobacterium ulcerans Agy99; | A0QBE6; |
| | Mycobacterium bovis; | A0PL16; |
| | Mycobacterium leprae; | Q7U140; |
| | Proteus mirabilis HI4320; | Q9CBD6; |
| | Staphylococcus aureus 04-02981; | YP_002150004; |
| | Acetobacter pasteurianus; | ADC36400; |
| | Saccharomyces cerevisiae; | AAM21208; |
| | Zymomonas mobilis subsp. mobilis CP4; | CAA39398; |
| | Mycobacterium tuberculosis; | AAA27696; |
| | Mycobacterium smegmatis str. MC2 | O53865; |
| | 155; Mycobacterium bovis BCG str. | A0R480; |
| | Pasteur 1173P2; | A1KGY5; |
| 43: | Thermoplasma volcanium GSS1; | BAB59540 |
| Alcohol dehydrogenase | Gluconacetobacter hansenii; | ZP_06834544; |
| (NAD dependent) | Saccharomyces cerevisiae; | CAA89136; |
| (EC 1.1.1.1); | Aeropyrum pernix K1; | NP_148480; |
| | Rhodobacterales bacterium HTCC2083; | ZP_05073895; |
| | Bradyrhizobium japonicum USDA 110; | NP_769420; |
| | Syntrophothermus lipocalidus; | ADI01021; |
| | Fervidobacterium nodosum Rt17-B1; | YP_001411173; |
| | Desulfotalea psychrophila LSv54; | YP_065604; |
| | Acetobacter pasteurianus IFO 3283-03; | BAI03878; |
| | Gluconobacter oxydans 621H; | YP_192500; |
| | Aeromonas hydrophila; | ABK38651; |
| | Acetobacter pasteurianus IFO 3283-01; | BAI00830; |
| | Streptomyces hygroscopicus; | EFL29096; |
| | Zymomonas mobilis; | AFN57379; |
| | Ralstonia eutropha H16; | Q0KDL6; |
| | Staphylococcus aureus; | Q5HI63, Q2YSX0; |
| | Staphylococcus epidermidis RP62A; | Q5HRD6; |
| | Thalassiosira pseudonana CCMP1335; | EED91217, XP_002291110; |
| | Rhodobacter sphaeroides; | WP_011337799; |
| | Alcanivorax borkumensis; | WP_011587359; |
| | Geobacillus stearothermophilus; | P42328; |
| | Saccharomyces cerevisiae; | NP_013800, EDN64471; |
| | Geobacillus sp. JF8; | AGT31264; |
| | Pseudomonas alcaligenes OT 69; | EQM66009; |
| | Pseudomonas aeruginosa; | KHE33423; |
| | Pseudomonas sp. HMP271; | KGK82208; |
| | Erythrobacter sp. JL475; | KEO86527; |
| | Komagataeibacter rhaeticus AF1; | KDU94382; |
| | Hyphomonas atlantica; | KCZ64352; |
| | Mastigocoleus testarum; | WP_027839825; |
| | Blastomonas sp. CACIA14H2; | ESZ87639; |
| 44: | Pelotomaculum thermopropionicum SI; | YP_001211038, BAF58669; |
| Alcohol dehydrogenase | Fusobacterium sp. 7_1; | ZP_04573952, EEO43462; |
| (NADPH dependent) (EC | Pichia pastoris GS115; | XP_002494014, XP_002490014; |
| 1.1.1.2); | Pichia pastoris GS115; | CAY71835, XP_002492217, |
| | Escherichia coli str. K-12 substr. | CAY67733; |
| | MG1655; | yqhD, NP_417484, AAC76047; |
| | Clostridium hathewayi DSM 13479; | EFC99049; |
| | Clostridium butyricum 5521; | ZP_02948287; |
| | Clostridium beijerinckii NCIMB 8052; | AAT38119; |
| | Fusobacterium ulcerans ATCC 49185; | ZP_05632371; |
| | Fusobacterium sp. D11; Desulfovibrio | ZP_05440863; |
| | desulfuricans subsp. desulfuricans str. | YP_389756; |
| | G20; Clostridium novyi NT; | YP_878957; |
| | Clostridium tetani E88; | NP_782735; |
| | Aureobasidium pullulans; | ADG56699; |
| | Scheffersomyces stipitis CBS 6054, | ABN66271, XP_001384300; |
| | Thermotoga lettingae TMO; | YP_001471424; |
| | Thermotoga petrophila RKU-1; | YP_001244106; |
| | Coprinopsis cinerea okayama7#130; | XP_001834460; |
| | Saccharomyces cerevisiae EC1118; | CAY82157; |
| | Saccharomyces cerevisiae JAY291; | EEU07174; |
| | Klebsiella oxytoca E718; | YP_006496277, AFN30383; |
| | Clostridium intestinale URNW; | ERK32339; |
| | butyrate-producing bacterium SS3/4; | YP_007825178; |
| | Synechocystis sp. PCC 6803; | WP_010874320, NP_443028; |
| | Synechocystis sp. PCC 6714; | AIE73666; |
| | Calothrix sp. PCC 7507; | YP_007063887;; |
| | Aphanizomenon flos-aquae; | KHG39231; |
| | Planktothrix mougeotii; | WP_026796109; |
| | Synechococcus sp. NKBG042902; | WP_030008223; |
| | Synechococcus sp. NKBG15041c; | WP_028954057; |
| | Synechocystis sp. PCC 7509; | WP_024545825; |
| | Dolichospermum circinale; | WP_028091627; |
| | Neosynechococcus sphagnicola sy1; | KGF72916; |
| | filamentous cyanobacterium ESFC-1; | WP_026222390; |
| | Fischerella sp. PCC 9605; | WP_026731746; |
| | Arthrospira platensis; | KDR57756; |
| | Spirulina subsalsa; | WP_026079920; |
| | Thermosynechococcus sp. NK55a; | AHB89154; |
| | Thermus sp. CCB_US3_UF1; | AEV16814, AEV17127; |
| | Pelotomaculum thermopropionicum SI; | BAF58669; |
| | Bacillus subtilis; | KFC30246; |
| | Gracilibacillus halophilus YIM-C55.5; | ENH96132; |
| | Hydrogenobacter thermophilus TK-6; | YP_003433496, BAI70295; |
| | Geobacillus sp. JF8; | AGT31348; |
| | Hyphomicrobium nitrativorans NL23; | AHB47697; |
| | Gloeobacter violaceus PCC 7421; | NP_923681; |
| | Trichodesmium erythraeum IMS101; | YP_722487; |
| | Scytonema hofmanni UTEX B 1581; | WP_029632527 |
| | Nostoc sp. PCC 7120; | NP_489374; |
| | Fischerella sp.; | WP_026735116, WP_026723997; |
| | Chlorogloeopsis fritschii; | WP_026087612 |
| 45: | Thermaerobacter subterraneus DSM | EFR61439; |
| Phosphoenolpyruvate | 13965; Cyanothece sp. PCC 7822; | YP_003887888; |
| carboxylase | Thermus sp.; Rhodothermus marinus; | BAA07723; CAA67760; |
| (EC 4.1.1.31) | Thermosynechococcus elongatus BP-1; | NP_682702, BAC09464; |
| | Leadbetterella byssophila DSM 17132; | YP_003998059, ADQ17706; |
| | Riemerella anatipestifer DSM 15868; | ADQ81501, YP_004045007; |
| | Mucilaginibacter paludis DSM 18603; | EFQ77722; |
| | Truepera radiovictrix DSM 17093; | YP_003706036; |
| | Ferrimonas balearica DSM 9799; | YP_003911597, ADN74523; |
| | Meiothermus silvanus DSM 9946; | YP_003685046; |
| | Nocardiopsis dassonvillei subsp. | YP_003681843; |
| | dassonvillei DSM 43111; E. coli, | ZP_07594313, ZP_07565817; |
| | Meiothermus ruber DSM 1279; | ADD27759; |
| | Olsenella uli DSM 7084; | YP_003801346, ADK68466; |
| | Ktedonobacter racemifer DSM 44963; | ZP_06967036, EFH90147; |
| | Rhodopirellula baltica SH 1; | NP_866412, CAD78193; |
| | Oceanithermus profundus DSM 14977; | ADR36285; |
| | marine bacterium HP15; | ADP96559; |
| | Marivirga tractuosa DSM 4126; | ADR23252; |
| | Mucilaginibacter paludis DSM 18603; | ZP_07746438; |
| | Streptomyces coelicolor A3(2); | NP_627344; |
| | Delftia acidovorans SPH-1; | ABX34873; |
| | Actinobacillus pleuropneumoniae | ZP_07544559; |
| | serovar 13 str. N273; Prochlorococcus | ABO18389; |
| | marinus str. MIT 9301; | |
| | Prochlorococcus marinus str. NATL1A | ABM76577; |
| | Prochlorococcus marinus str. MIT | ABM72969; |
| | 9515; Clostridium cellulovorans 743B; | YP_003842669, ADL50905; |
| | Neisseria meningitidis Z2491; | CAM07667; |
| | Deinococcus geothermalis DSM 11300; | ABF44963; |
| | Micromonospora sp. L5; | ZP_06399624; |
| | Chlorobium phaeobacteroides DSM | ABL64615; |
| | 266; Arthrobacter sp. FB24; | YP_830113; |
| | Rhodomicrobium vannielii ATCC | YP_004010507; |
| | 17100; Gordonia bronchialis DSM | YP_003273502; |
| | 43247; Thermus aquaticus Y51MC23; | ZP_03496338; |
| | Burkholderia ambifaria IOP40-10; | ZP_02894226; |
| 46: | Thermotoga lettingae TMO; | YP_001470126; |
| Aspartate aminotransferase | Synechococcus elongatus PCC 6301; | YP_172275; |
| (EC 2.6.1.1) | Synechococcus elongatus PCC 7942; | YP_401562; |
| | Thermosipho melanesiensis BI429; | YP_001306480; |
| | Thermotoga petrophila RKU-1; | YP_001244588; |
| | Thermus thermophilus; | BAA07487; |
| | Anoxybacillus flavithermus WK1; | YP_002315494; |
| | Bacillus sp.; E. coli, | AAA22250; aspC: BAB34434; |
| | Pelotomaculum thermopropionicum SI; | YP_001211971; |
| | Phormidium lapideum; | BAB86290; |
| | Fervidobacterium nodosum Rt17-B1; | YP_001410686, YP_001409589; |
| | Geobacillus kaustophilus HTA426; | YP_148025, YP_147632, |
| | Thermosynechococcus elongatus BP-1; | YP_146225; NP_683147; |
| | Anoxybacillus flavithermus WK1; | ACJ34747; |
| | Geobacillus kaustophilus HTA426; | BAD77213, BAD76064; |
| | Spirochaeta thermophila DSM 6192; | YP_003874653; |
| | Caldicellulosiruptor bescii DSM 6725; | YP_002572445; |
| | Caldicellulosiruptor saccharolyticus | YP_001179582; |
| | DSM 8903; | |
| | Arabidopsis thaliana; | AAA79371; |
| | Glycine max; | AAA33942; |
| | Lupinus angustifolius; | CAA42430; |
| | Chlamydomonas reinhardtii; | XP_001696609; |
| | Micromonas pusilla CCMP1545; | XP_003060871; |
| 47: | Thermotoga lettingae TMO; | YP_001470361, ABV33297; |
| Aspartokinase (EC = 2.7.2.4) | Cyanothece sp. PCC 8802; | YP_003136939; |
| | Thermotoga petrophila RKU-1 | YP_001244864, YP_001243977; |
| | Hydrogenobacter thermophilus TK-6; | YP_003432105, BAI68904; |
| | Anoxybacillus flavithermus WK1; | ACJ35001; |
| | Bacillus sp.; | AAA22251; |
| | Spirochaeta thermophila DSM 6192; | YP_003873788, ADN01515; |
| | Anoxybacillus flavithermus WK1; | ACJ34043, YP_002316986; |
| | Geobacillus kaustophilus HTA426; | BAD77480, YP_149048; |
| | Syntrophothermus lipocalidus DSM | ADI02230, YP_003702795; |
| | 12680; E. coli; | ZP_07594328, ZP_07565832; |
| | Thermosynechococcus elongatus BP-1; | NP_682623, BAC09385; |
| | Fervidobacterium nodosum Rt17-B1; | ABS59942, YP_001410786; |
| | Spirochaeta thermophila DSM 6192; | YP_003873302, ADN01029; |
| | Pelotomaculum thermopropionicum SI; | YP_001212149, YP_001211837; |
| | Caldicellulosiruptor saccharolyticus; | ABP66605; |
| | Caldicellulosiruptor bescii DSM 6725; | YP_002573821; |
| | Thermosipho melanesiensis BI429; | YP_001307097, ABR31712; |
| | Thermotoga lettingae TMO; | YP_001470985, ABV33921; |
| | Arabidopsis thaliana; | CAA67376; |
| | Chlamydomonas reinhardtii; | XP_001698576, EDP08069, |
| | | XP_001695256; |
| 48: | Thermotoga lettingae TMO; | YP_001470981, ABV33917; |
| Aspartate-semialdehyde | Trichodesmium erythraeum IMS101; | ABG50031; |
| dehydrogenase | Prochlorococcus marinus str. MIT; | ABM76828; |
| | Thermotoga petrophila RKU-1; | ABQ47283, YP_001244859; |
| | Caldicellulosiruptor saccharolyticus | ABP67176, YP_001180367; |
| | DSM 8903; Syntrophothermus | ADI01804, YP_003702369; |
| | lipocalidus DSM 12680; E. coli; | YP_001460230, YP_001464895; |
| | Fervidobacterium nodosum Rt17-B1 | YP_001409594, ABS59937; |
| | Caldicellulosiruptor bescii DSM 6725; | YP_002573009; |
| | Thermosipho melanesiensis BI429; | YP_001307092, ABR31707; |
| | Spirochaeta thermophila DSM 6192; | YP_003875128, ADN02855; |
| | Pelotomaculum thermopropionicum SI; | YP_001211836, BAF59467; |
| | Hydrogenobacter thermophilus TK-6; | YP_003432252, BAI69051; |
| | Anoxybacillus flavithermus WK1; | YP_002316029, ACJ34044; |
| | Geobacillus kaustophilus HTA426; | YP_147128, BAD75560; |
| | Deferribacter desulfuricans SSM1; | YP_003496635, BAI80879; |
| | Thermosynechococcus elongatus BP-1; | NP_680860, BAC07622; |
| | Carboxydothermus hydrogenoformans; | AAG23574, AAG23573; |
| | Chlamydomonas reinhardtii; | XP_001695059, EDP02211; |
| | Polytomella parva; | ABH11018; |
| | Glycine max; | ACU30050; |
| | Zea mays; | ACG41594; |
| | Oryza sativa Indica Group; | ABR26065; |
| 49: | Syntrophothermus lipocalidus DSM | ADI02231, YP_003702796; |
| Homoserine dehydrogenase | 12680; Cyanothece sp. PCC 7822; | YP_003887242; |
| | Caldicellulosiruptor bescii DSM 6725; | YP_002573819; |
| | Caldicellulosiruptor saccharolyticus | ABP66607, YP_001179798; |
| | DSM 8903; E. coli; | EFJ98002; |
| | Spirochaeta thermophila DSM 6192; | YP_003873441, ADN01168; |
| | Pelotomaculum thermopropionicum SI; | YP_001212151, BAF59782; |
| | Hydrogenobacter thermophilus TK-6; | YP_003431981, BAI68780; |
| | Anoxybacillus flavithermus WK1; | YP_002316756, ACJ34771; |
| | Geobacillus kaustophilus HTA426; | YP_148817, BAD77249; |
| | Deferribacter desulfuricans SSM1; | YP_003496401, BAI80645; |
| | Thermosynechococcus elongatus BP-1; | NP_681068, BAC07830; |
| | Glycine max; | ABG78600, AAZ98830; |
| | Chlamydomonas reinhardtii; | XP_001699712, EDP07408; |
| | Micromonas sp. RCC299; | ACO69662, XP_002508404; |
| 50: | Thermotoga petrophila RKU-1; | YP_001243979, ABQ46403; |
| Homoserine kinase | Cyanothece sp. PCC 7822; | YP_003886645; |
| (EC 2.7.1.39) | Caldicellulosiruptor bescii DSM 6725; | YP_002573820; |
| | Caldicellulosiruptor saccharolyticus | ABP66606, YP_001179797; |
| | DSM 8903; E. coli; | AP_000667, BAB96580; |
| | Anoxybacillus flavithermus WK1; | YP_002316754, ACJ34769; |
| | Geobacillus kaustophilus HTA426; | YP_148815, BAD77247; |
| | Thermosynechococcus elongatus BP-1; | NP_682555, BAC09317; |
| | Pelotomaculum thermopropionicum SI; | YP_001212150, BAF59781; |
| | Hydrogenobacter thermophilus TK-6; | YP_003433124, BAI69923; |
| | Chlamydomonas reinhardtii; | XP_001701899, EDP06874; |
| | Prototheca wickerhamii; | ABC24954; |
| | Arabidopsis thaliana; | NP_179318, AAD33097; |
| | Glycine max; | ACU26535; |
| | Zea mays; | ACG46592; |
| 51: | Thermotoga petrophila RKU-1; | YP_001243978, ABQ46402; |
| Threonine synthase | Cyanothece sp. PCC 7425; | YP_002485009; |
| (EC 4.2.99.2) | Thermosipho melanesiensis BI429; | YP_001306558, ABR31173; |
| | Syntrophothermus lipocalidus DSM | ADI02519, YP_003703084; |
| | 12680; E. coli; | AP_000668, NP_414545; |
| | Pelotomaculum thermopropionicum SI; | YP_001213220; |
| | Anoxybacillus flavithermus WK1; | YP_002316755, ACJ34770; |
| | Caldicellulosiruptor bescii DSM 6725; | YP_002572552; |
| | Caldicellulosiruptor saccharolyticus | YP_001180015, ABP66824; |
| | DSM 8903; Hydrogenobacter | YP_003433070, YP_003433019, |
| | thermophilus TK-6; Geobacillus | BAI69869, BAI69818; |
| | kaustophilus HTA426; | YP_148816, YP_147614; |
| | Thermosynechococcus elongatus BP-1; | NP_682017, NP_681772, |
| | Spirochaeta thermophila DSM 6192; | BAC08534, BAC08779; |
| | Deferribacter desulfuricans SSM1; | YP_003873303, ADN01030; |
| | Geobacillus kaustophilus HTA426; | YP_003495358, BAI79602; |
| 52: | Geobacillus kaustophilus HTA426; | BAD76058, BAD75876, |
| Threonine ammonia-lyase | Prochlorococcus marinus str. MIT | YP_147626, YP_147444; |
| (EC 4.3.1.19) | 9202; Synechococcus sp. PCC 7335; | ZP_05137562; ZP_05035047; |
| | Thermotoga petrophila RKU-1; | ABQ46585, YP_001244161; |
| | Pelotomaculum thermopropionicum SI; | YP_001210652, BAF58283; |
| | Anoxybacillus flavithermus WK1; | YP_002315804, YP_002315746; |
| | Deferribacter desulfuricans SSM1; | YP_003497384, BAI81628; |
| | E. coli; | YP_001746093, ZP_07690697; |
| | Neisseria lactamica ATCC 23970; | EEZ76650, ZP_05986317; |
| | Citrobacter youngae ATCC 29220; | EFE07783, ZP_06571237; |
| | Neisseria polysaccharea ATCC 43768; | EFH23894, ZP_06863451; |
| | Providencia rettgeri DSM 1131; | EFE52186, ZP_06127162; |
| | Neisseria subflava NJ9703; | EFC51529, ZP_05985502; |
| | Mannheimia haemolytica PHL213; | ZP_04978734; |
| | Achromobacter piechaudii ATCC | ZP_06687730, ZP_06684811; |
| | 43553; Neisseria meningitidis ATCC | ZP_07369980, EFM04207; |
| | 13091; Synechococcus sp. CC9902; | ABB26032; |
| | Synechococcus sp. PCC 7002; | ACA99606; |
| | Synechococcus sp. WH 8109; | ZP_05790446, EEX07646; |
| | Cyanobium sp. PCC 7001; | EDY39077, ZP_05045768; |
| | Anabaena variabilis ATCC 29413; | ABA20300; |
| | Microcoleus chthonoplastes PCC 7420; | ZP_05029756; |
| | Chlamydomonas reinhardtii; | XP_001701816, EDP06791; |
| 53: | Caldicellulosiruptor saccharolyticus | ABP66750, ABP66751, |
| Acetolactate synthase | DSM 8903; | YP_001179942, ABP66455, |
| (EC 2.2.1.6) | | YP_001179941, YP_001179646; |
| | Thermotoga petrophila RKU-1; | YP_001243976, YP_003345845, |
| | | ADA66432, ADA66431, |
| | | ABQ46399, YP_001243975, |
| | | ABQ46400, YP_003345846; |
| | Thermosynechococcus elongatus BP-1; | NP_682614, BAC09376, |
| | | NP_681670, BAC08432, |
| | | NP_682086; |
| | Syntrophothermus lipocalidus DSM | ADI02904, YP_003703469, |
| | 12680; | ADI02903, YP_003703468; |
| | Pelotomaculum thermopropionicum SI; | BAF58709, BAF58917, |
| | | YP_001211286, YP_001211078; |
| | Geobacillus kaustophilus HTA426; | BAD76946, YP_148514, |
| | | BAD76945, YP_148513; |
| | Caldicellulosiruptor bescii DSM 6725; | ACM59790, ACM59628, |
| | | ACM59629, YP_002572563, |
| | | YP_002572401, YP_002572402; |
| | | YP_003432299, YP_003432300, |
| | Hydrogenobacter thermophilus TK-6; | BAI69099, BAI69098; |
| | | YP_003874926, YP_003874927, |
| | Spirochaeta thermophila DSM 6192; | ADN02654, ADN02653, |
| | | ACJ33615, YP_002314957, |
| | Anoxybacillus flavithermus WK1; | ACJ32972, ACJ32973, |
| | | YP_002314958; |
| | | YP_003496879, BAI81123, |
| | Deferribacter desulfuricans SSM1; | YP_003496878, BAI81122; |
| | | AP_004121, BAE77622, |
| | Escherichia coli str. K-12 substr. | AP_004122, BAE77623, |
| | W3110; | BAE77528, AP_004027, |
| | | BAB96646, AP_000741; |
| | | BAA12700; |
| | Saccharomyces cerevisiae, | EDN64495, CAA89744, |
| | | EDV09697; |
| | Thermus aquaticus; | YP_001735999, ACB00744; |
| | Synechococcus sp. PCC 7002; | YP_002376012; |
| | Cyanothece sp. PCC 7424; | YP_324035; |
| | Anabaena variabilis ATCC 29413; | NP_487595, BAB75254; |
| | Nostoc sp. PCC 7120; | YP_001655615; |
| | Microcystis aeruginosa NIES-843; | NP_441297, BAA17984, |
| | Synechocystis sp. PCC 6803; | CAA66718, NP_441304, |
| | | NP_442206, BAA10276; |
| | Synechococcus sp. JA-2-3B′a(2-13); | YP_478353; |
| | Synechococcus sp. JA-3-3Ab; | YP_475372, ABD00213, |
| | | ABD00270, YP_475476, |
| | | YP_475533; |
| | Chlamydomonas reinhardtii; | AAC03784, AAB88292, |
| | | XP_001700185, EDO98300, |
| | | XP_001695168, EDP01876; |
| | Volvox carteri; | AAC04854, AAB88296; |
| | Bacillus subtilis subsp. subtilis str. 168; | CAB07802 (AlsS); |
| | Bacillus licheniformis ATCC 14580; | AAU42663 (AlsS); |
| 54: | Syntrophothermus lipocalidus DSM | ADI02902, YP_003703467; |
| Ketol-acid reductoisomerase | 12680; Caldicellulosiruptor | ABP66752, YP_001179943; |
| (EC 1.1.1.86; ilvC) | saccharolyticus DSM 8903; E. coli; | AAA67577, YP_001460567; |
| | Thermotoga petrophila RKU-1; | ABQ46398, YP_001243974; |
| | Calditerrivibrio nitroreducens DSM; | YP_004050904; |
| | Spirochaeta thermophila DSM 6192; | YP_003874858, ADN02585; |
| | Pelotomaculum thermopropionicum SI; | YP_001211079, BAF58710; |
| | Cyanothece sp. PCC 7822; | YP_003885458; |
| | Hydrogenobacter thermophilus TK-6; | YP_003433279, BAI70078; |
| | Anoxybacillus flavithermus WK1; | YP_002314959, ACJ32974; |
| | Caldicellulosiruptor bescii DSM 6725; | YP_002572403; |
| | Geobacillus kaustophilus HTA426; | YP_148512, BAD76944; |
| | Deferribacter desulfuricans SSM1; | YP_003496877, BAI81121; |
| | Thermosynechococcus elongatus BP-1; | NP_683044, BAC09806; |
| | Cyanothece sp. PCC 7425; | YP_002482078; |
| | Nostoc punctiforme PCC 73102; | ACC82013; |
| | Trichodesmium erythraeum IMS101; | ABG53327; |
| | Synechococcus sp. PCC 7335; | ZP_05036558; |
| | Microcoleus chthonoplastes PCC 7420; | ZP_05026584; |
| | Prochlorococcus marinus str. MIT | ABO18124; |
| | 9301; Cyanobium sp. PCC 7001; | EDY39000; |
| | Arthrospira sp. PCC 8005; | ZP_07166132; |
| | Arabidopsis thaliana; | CAA48253, NP_001078309; |
| | Pisum sativum (pea); | CAA76854; |
| | Zea mays; | ACG35752; |
| | Chlamydomonas reinhardtii; | XP_001702649, EDP06428; |
| | Polytomella parva; | ABH11013; |
| | Nostoc sp. PCC 7120 (Anabaena sp. | BAB74014, NP_486355, |
| | PCC 7120); | WP_010996471; |
| 55: | Thermotoga petrophila RKU-1; | YP_001243973, ABQ46397; |
| Dihydroxy-acid dehydratase | Cyanothece sp. PCC 7822; | YP_003887466; |
| (EC 4.2.1.9; ilvD) | Marivirga tractuosa DSM 4126; | YP_004053736; |
| | Geobacillus kaustophilus HTA426; | YP_147899, BAD76331, |
| | Syntrophothermus lipocalidus DSM | YP_147822, BAD76254; |
| | 12680; | ADI02905, YP_003703470; |
| | Spirochaeta thermophila DSM 6192; | YP_003874669, ADN02396; |
| | Anoxybacillus flavithermus WK1; | YP_002315593; |
| | Caldicellulosiruptor bescii DSM 6725; | YP_002572562; |
| | Caldicellulosiruptor saccharolyticus | YP_001179645, ABP66454; |
| | DSM 8903; E. coli; | ADR29155, YP_001460564; |
| | Deferribacter desulfuricans SSM1; | YP_003496880, BAI81124; |
| | Thermosynechococcus elongatus BP-1; | NP_681848, BAC08610; |
| | Hydrogenobacter thermophilus TK-6; | YP_003431766, BAI68565; |
| | Nostoc punctiforme PCC 73102; | ACC82168, ADN14191; |
| | ‘Nostoc azollae’ 0708; | ADI62939; |
| | Arthrospira maxima CS-328; | EDZ97146; |
| | Prochlorococcus marinus str. MIT | AB017457; |
| | 9301; Cyanobium sp. PCC 7001; | ZP_05044537, EDY37846; |
| | Synechococcus sp. PCC 7335; | ZP_05037932; |
| | Arthrospira platensis str. Paraca; | ZP_06383646; |
| | Microcystis aeruginosa NIES-843; | BAG02689; |
| | Chlamydomonas reinhardtii; | XP_001693179, EDP03205; |
| | Arabidopsis thaliana; | BAB03011; |
| | Oryza sativa Indica Group; | ABR25557; |
| | Glycine max; | ACU26534; |
| | Nostoc sp. PCC 7120 (Anabaena sp. | NP_486811, WP_010996924; |
| | PCC 7120); | |
| 56: | Schizosaccharomyces japonicus | XP_002173231, EEB06938; |
| 2-Methylbutyraldehyde | yFS275; | |
| reductase | Pichia pastoris GS115; | XP_002490018, CAY67737, |
| (EC 1.1.1.265) | | XM_002489973; |
| | Saccharomyces cerevisiae S288c; | DAA12209, NP_010656, |
| | | NM_001180676; |
| | Aspergillus fumigatus Af293; | XP_752003; |
| | Debaryomyces hansenii CBS767; | XP_002770138; |
| | Debaryomyces hansenii | CAR65507; |
| | Kluyveromyces lactis; | CAH02579; |
| | Lachancea thermotolerans CBS 6340; | XP_002554884; |
| | Lachancea thermotolerans; | CAR24447, CAR23718; |
| | Saccharomyces cerevisiae EC1118; | CAY78868; |
| | Saccharomyces cerevisiae JAY291; | EEU08013; |
| 57: | Saccharomyces cerevisiae S288c; | DAA10635, NM_001183405, |
| 3-Methylbutanal reductase | | NP_014490; |
| (EC 1.1.1.265) | Saccharomyces cerevisiae EC1118; | CAY86141; |
| | Saccharomyces cerevisiae JAY291; | EEU07090; |
| 07′: | Geobacillus kaustophilus HTA426; | YP_147173, BAD75605; |
| 3-Ketothiolase (reversible) | Azohydromonas lata; | |
| | Rhodoferax ferrireducens T118; | YP_523526; |
| | Allochromatium vinosum; | CAA01849, CAA01846; |
| | Dechloromonas aromatica RCB; | YP_286222; |
| | Rhodobacter sphaeroides ATCC 17029; | YP_001041914; |
| | Rhodobacter sphaeroides ATCC 17025; | YP_001166229; |
| | Bacillus sp. 256; | ABX11181; |
| | Silicibacter lacuscaerulensis ITI-1157; | ZP_05785678; |
| | Aspergillus fumigatus Af293; | XP_752635; |
| | Rhizobium etli; | AAK21958; |
| | Citreicella sp. SE45; | ZP_05784120, ZP_05781517; |
| | Silicibacter sp. TrichCH4B; | ZP_05742998; |
| | Azohydromonas lata; | AAC83659, AAD10275; |
| | Chromobacterium violaceum; | AAC69616; |
| | Dinoroseobacter shibae DFL 12; | ABV95064; |
| | Alcaligenes sp. SH-69; | AAP41838; |
| | Candida dubliniensis CD36; | CAX43351, XP_002418052; |
| | Pseudomonas sp. 14-3; | CAK18903; |
| | Aspergillus flavus NRRL3357; | XP_002375989; |
| | Aedes aegypti; | EAT37298, EAT37297, |
| | | XP_001654752, XP_001654751; |
| | Scheffersomyces stipitis CBS 6054; | ABN68380, XP_001386409; |
| | Cyanothece sp. PCC 7424; | YP_002375827, ACK68959; |
| | Cyanothece sp. PCC 7822; | YP_003886602, ADN13327; |
| | Microcystis aeruginosa NIES-843; | BAG04828; |
| 08′: | Syntrophothermus lipocalidus DSM | YP_003702743, ADI02178, |
| 3-Hydroxyacyl-CoA | 12680; | ADI01287, ADI01071; |
| dehydrogenase | Oceanithermus profundus DSM 14977; | ADR36325; |
| | Anoxybacillus flavithermus WK1; | YP_002317076, YP_002315864; |
| | Pelotomaculum thermopropionicum SI; | YP_001210823, BAF58454; |
| | Geobacillus kaustophilus HTA426; | YP_149248, YP_147889; |
| | Deferribacter desulfuricans SSM1; | YP_003497047, BAI81291; |
| | Glomerella graminicola M1.001; | EFQ32520, EFQ35765; |
| | Legionella pneumophila str. Corby; | YP_001250712, ABQ55366; |
| | Aspergillus fumigatus Af293; | XP_748706, XP_748351; |
| | Coprinopsis cinerea okayama7#130; | EAU80763; |
| | Botryotinia fuckeliana B05.10; | XP_001559519; |
| | Coccidioides posadasii; E. coli; | ABH10642; YP_001462756; |
| | Chelativorans sp. BNC1; | YP_675197; |
| | Nostoc punctiforme PCC 73102; | ACC81853, YP_001866796; |
| | Oscillatoria sp. PCC 6506; | ZP_07114022, CBN59220; |
| 09′: | Bordetella petrii; | CAP41574; |
| Enoyl-CoA dehydratase | Bordetella petrii DSM 12804; | YP_001629844; |
| | Anoxybacillus flavithermus WK1; | YP_002315700, YP_002314932; |
| | Geobacillus kaustophilus HTA426; | YP_148541, YP_147845, |
| | Geobacillus kaustophilus; | BAD76199; BAD18341; |
| | Syntrophothermus lipocalidus DSM | ADI02939, ADI02740, |
| | 12680; | ADI02007, ADI01364; |
| | Acinetobacter sp. SE19; | AAG10018; |
| | Scheffersomyces stipitis CBS 6054; | ABN64617, XP_001382646; |
| | Laccaria bicolor S238N-H82; | EDR09131, XP_001888157; |
| | Alternaria alternate; | BAH83503, |
| | Ajellomyces dermatitidis ER-3; | EEQ91989; |
| | Aspergillus fumigatus Af293; | EAL93360, XP_755398; |
| | Cryptococcus neoformans var. | XP_572730; |
| | neoformans JEC21; E. Coli; | ADN73405, YP_001458194; |
| | Aspergillus flavus NRRL3357; | XP_002377859; |
| | Laccaria bicolor S238N-H82; | EDR01115; |
| | Neosartorya fischeri NRRL 181; | EAW18645; |
| | Nostoc sp. ‘Peltigera membranacea | ADA69246; |
| | cyanobiont’; | |
| 10′: | Xanthomonas campestris pv. | CAP53709; |
| 2-Enoyl-CoA reductase | Campestris; Xanthomonas campestris | YP_001905744; |
| | pv. campestris str. B100; Xanthomonas | ZP_06489037; |
| | campestris pv. musacearum | |
| | NCPPB4381; Xanthomonas campestris | ZP_06487845; |
| | pv. vasculorum NCPPB702; | |
| | Aeromicrobium marinum DSM 15272; | ZP_07718056, EFQ82338; |
| | Rhodobacterales bacterium HTCC2083; | ZP_05074461, EDZ42121; |
| | Lysinibacillus fusiformis ZC1; | ZP_07049092, EFI69525; |
| | Mycobacterium smegmatis str. MC2; | YP_886510, ABK76225; |
| | Lysinibacillus sphaericus C3-41; | YP_001699417, ACA41287; |
| | Coprinopsis cinerea okayama7#130; | XP_002910885, EFI27391; |
| | Arthroderma gypseum CBS 118893; | EFR05506; |
| | Paracoccidioides brasiliensis Pb01; | XP_002796528, EEH39074; |
| | Paracoccidioides brasiliensis Pb18; | EEH43955; |
| | Ajellomyces capsulatus G186AR; | EEH03439; |
| | Ostreococcus tauri; | XP_003083795, CAL57762; |
| | Jatropha curcas; | ACS32302; |
| 11′: | Clostridium cellulovorans 743B; | YP_003845606, ADL53842; |
| Acyl-CoA reductase (EC | Thermosphaera aggregans DSM 11486; | YP_003649571, ADG90619; |
| 1.2.1.50) | Delftia acidovorans SPH-1; | YP_001565543, ABX37158; |
| | Comamonas testosteroni KF-1; | ZP_03543536; |
| | Bifidobacterium longum subsp. infantis | YP_002321654, ACJ51276; |
| | ATCC 15697; | |
| | Clostridium papyrosolvens DSM 2782; | ZP_05497968, EEU57047; |
| | Acidovorax avenae subsp. avenae ATCC | ZP_06211782, EFA39209; |
| | 19860; | |
| | Comamonas testosteroni KF-1; | EED67822; |
| | Aminomonas paucivorans DSM 12260; | ZP_07740542, EFQ24431; |
| | Herpetosiphon aurantiacus ATCC | ABX07240, YP_001547368; |
| | 23779; | |
| | Clostridium beijerinckii NCIMB 8052; | ABR34265, YP_001309221; |
| | Geobacillus sp. G11MC16; | ZP_03148237, EDY05596; |
| | Clostridium lentocellum DSM 5427; | ZP_06885967, EFG96716; |
| | Leadbetterella byssophila DSM 17132; | YP_003997212, ADQ16859; |
| | Actinosynnema mirum DSM 43827; | YP_003101455, ACU37609; |
| | Haliangium ochraceum DSM 14365; | ACY16972, YP_003268865; |
| | Photobacterium phosphoreum; | AAT00788; |
| | Simmondsia chinensis; | AAD38039; |
| | Hevea brasiliensis; | AAR88762; |
| | Arabidopsis thaliana; | ABE65991; |
| 12′: | Mycobacterium chubuense NBB4; | ACZ56328; |
| Hexanol dehydrogenase | | |
| 12″: | Drosophila subobscura; | ABO61862, ABO65263, |
| Octanol dehydrogenase | | CAD43362, CAD43361, |
| EC 1.1.1.73 | | CAD54410, CAD43360, |
| | | CAD43359, CAD43358 |
| | | CAD43357, CAD43356; |
| 43′: | Pyrococcus furiosus DSM 3638; | AAC25556; |
| Short chain alcohol | Burkholderia vietnamiensis G4; | ABO56626; |
| dehydrogenase | Geobacillus thermoleovorans; | BAA94092; |
| | Geobacillus kaustophilus HTA426; | YP_146837, BAD75269; |
| | Anoxybacillus flavithermus WK1; | YP_002314715, ACJ32730; |
| | Helicobacter pylori PeCan4; | YP_003927327, ADO07277; |
| | Mycobacterium chubuense NBB4; | ACZ56328; |
| | Mycobacterium avium subsp. avium | ZP_05215778; |
| | ATCC 25291; Aspergillus oryzae; | BAE71320; |
| | cyanobacterium UCYN-A; | YP_003421738, ADB95357; |
| | Anabaena circinalis AWQC131C; | ABI75134; |
| | Cylindrospermopsis raciborskii T3; | ABI75108; |
| | Helicobacter pylori Sat464; | ADO05766; |
| | Helicobacter pylori Cuz20; | ADO04259; |
| | Mycobacterium intracellulare ATCC | ZP_05228059, ZP_05228058; |
| | 13950; Mycobacterium avium subsp. | ZP_05215779; |
| | avium ATCC 25291; Gluconacetobacter | |
| | hansenii ATCC 23769; Helicobacter | ZP_06834730, EFG83978; |
| | pylori Shi470; | YP_001910563, ACD48533; |
| | Mycobacterium avium 104; | YP_880627, ABK67217; |
| | Citrus sinensis; | ADH82118; |
| | Gossypium hirsutum; | ABD65462; |
| | Arabidopsis halleri; | ABZ02361, ABZ02360; |
| | Paracoccidioides brasiliensis Pb01; | XP_002792148, EEH34889; |
| | Pyrenophora tritici-repentis Pt-1C-BFP; | XP_001940779, EDU43498; |
| | Ajellomyces capsulatus H143; | EER38733; |
| | Scheffersomyces stipitis CBS 6054; | XP_001382930, ABN64901; |
| 70: | Ralstonia eutropha H16; | NP_942643 (hoxK), NP_942644 |
| Membrane-bound | | (hoxG), YP_015633 (hoxZ); |
| hydrogenase (MBH) | | AAP85757 (hoxK), AAP85758 |
| | Ralstonia eutropha H16; | (hoxG), AAA16463 (hoxZ); |
| | | ABF08183 (hoxK), YP_583451 |
| | Cupriavidus metallidurans CH34; | (hoxG), ABF08182 (hoxG); |
| | Thiocapsa roseopersicina, | ADK12981, ADK12980; |
| | Thermococcus onnurineus NA1; | ACJ15972; |
| | Thermococcus sp. 4557; | YP_004763067, YP_004763083; |
| | Thermococcus sp. 4557; | YP_004763081; |
| | Thermococcus sp. 4557; | AEK73406, AEK73404; |
| | Pyrococcus furiosus DSM 3638; | NP_579163; |
| | Pyrococcus furiosus DSM 3638; | NP_579162; |
| | Pyrococcus yayanosii CH1; | YP_004624085; |
| | Pyrococcus yayanosii CH1; | YP_004624086; |
| | Pyrococcus yayanosii CH1; | YP_004624087; |
| | Pyrococcus horikoshii OT3; | NP_142896; |
| | Hydrogenovibrio marinus; | BAK19334; |
| | Alcaligenes sp.; | CAA63615; |
| | Rubrivivax sp.; | CAA63616; |
| | Hydrogenobacter thermophilus TK-6; | BAF73677; |
| | Thermococcus gammatolerans EJ3; | ACS32538; |
| | Methanoplanus petrolearius DSM | ADN36337; |
| | 11571; | YP_002958402; |
| | Thermococcus gammatolerans EJ3; | YP_004638463 (hoxZ); |
| | Oligotropha carboxidovorans | AEI08136 (hoxZ); |
| | OM5; Aquifex aeolicus VF5; | NP_213456 (hoxZ); |
| | Centipeda periodontii DSM 2778; | ZP_08500995 (hoxZ); |
| | Selenomonas noxia ATCC 43541; | ZP_06602778 (hoxZ); |
| | Allochromatium vinosum DSM 180; | ADC63224 (hoxZ); |
| | Thiomonas intermedia K12; | ADG32404 (hoxZ); |
| | Aquifex aeolicus VF5; | AAC06857 (hoxZ); |
| 71: | Ralstonia eutropha H16; | AAP85843 (hoxY), AAP85844 |
| Soluble hydrogenase (SH) | Ralstonia eutropha H16; | (HoxH); NP_942730 (hoxH), |
| (NAD(P)-reducing) | Ralstonia eutropha H16; | NP_942729 (hoxY); |
| | Ralstonia eutropha H16; | NP_942727 (hoxF), NP_942728 |
| | Ralstonia eutropha H16; | (hoxU); AAP85841 (hoxF), |
| | Ralstonia eutropha H16; | AAP85842 (hoxU); AAC06140 |
| | Ralstonia eutropha H16; | (hoxF), AAC06141 (hoxU), |
| | Ralstonia eutropha H16; | AAC06142 (hoxY), |
| | Ralstonia eutropha H16; | AAC06143 (hoxH); |
| | Rhodobacter capsulatus; | AAD38065 (hoxH); |
| | Azotobacter vinelandii DJ; | YP_002797671 (hoxH); |
| | Microcystis aeruginosa NIES-843; | BAG01243 (hoxH); |
| | Acaryochloris marina MBIC11017; | ABW32682 (hoxH); |
| | Synechococcus sp. PCC 7002; | AAN03569 (hoxH); |
| | Synechococcus elongatus PCC 6301; | CAA66383 (hoxH); |
| | Synechococcus elongatus PCC 6301; | CAA66382 (hoxY); |
| | Allochromatium vinosum; | AAX89151 (hoxY); |
| | Microcystis aeruginosa PCC 7806; | CAO88137 (hoxY); |
| | Azotobacter vinelandii DJ; | YP_002797670 (hoxY); |
| | Synechococcus elongatus PCC 6301; | CAA66381 (hoxU); |
| | Allochromatium vinosum; | AAX89150 (hoxU); |
| | Arthrospira platensis FACHB341; | ABC26909 (hoxU); |
| | Microcystis aeruginosa PCC 7806; | CAO88140 (hoxU); |
| | Lyngbya majuscula CCAP 1446/4; | AAY57574 (hoxU); |
| | Synechococcus elongatus PCC 6301; | YP_172263 (hoxU); |
| | Cyanothece sp. ATCC 51142; | YP_001803733 (hoxU); |
| | Synechococcus elongatus PCC 6301; | CAA73873 (hoxF); |
| | Allochromatium vinosum; | AAX89149 (hoxF); |
| | Arthrospira platensis FACHB341; | ABC26907 (hoxF); |
| | Synechococcus sp. PCC 7002; | YP_001733465 (hoxF); |
| | Anaerolinea thermophila UNI-1; | BAJ63286 (hoxH); |
| | Caloramator australicus RC3; | CCC57856 (hoxF); |
| 72: | Ralstonia eutropha H16; | NP_942649 (hoxO), AAP85763 |
| Hydrogenase accessary | Ralstonia eutropha H16; | (hoxO), AAA16467 (hoxO); |
| proteins | Cupriavidus metallidurans CH34; | ABF08176 (hoxO); YP_583445 |
| | Cupriavidus metallidurans CH34; | (hoxO); |
| | Ralstonia eutropha H16; | NP_942650 (hoxQ), AAP85764 |
| | | (hoxQ), AAA16468 (hoxQ); |
| | Cupriavidus metallidurans CH34; | ABF08175 (hoxQ), YP_583444 |
| | | (hoxQ); |
| | Azotobacter vinelandii; | AAA19504 (hoxQ); |
| | Salmonella enterica subsp.; | EHC91928 (hoxQ/hoxR), |
| | | EFX49216 (hoxQ/hoxR), |
| | Escherichia coli B354; | ZP_06652932 (hoxQ); |
| | Methyloversatilis universalis FAM5; | ZP_08506135 (hoxQ); |
| | Shigella flexneri CDC 796-83; | EFW61888 (hoxQ); |
| | Ralstonia eutropha H16; | AAA16469 (hoxR), |
| | | NP_942651(hoxR); |
| | Azotobacter vinelandii; | AAA19505 (hoxR); |
| | Ralstonia eutropha H16; | NP_942652 (hoxT), AAP85766 |
| | | (hoxT), AAA16470 (hoxT); |
| | Cupriavidus metallidurans CH34; | ABF08173 (hoxT); |
| | Azotobacter vinelandii DJ; | YP_002802114 (hoxT), |
| | | ACO81139 (hoxT); |
| | Ralstonia eutropha H16; | NP_942648 (hoxL), AAP85762 |
| | | (hoxL), AAA16466 (hoxL); |
| | Azotobacter vinelandii; | AAA19502 (hoxL); |
| | Oligotropha carboxidovorans OM5; | YP_015634 (hoxL); |
| | Cupriavidus metallidurans CH34; | ABF08177 (hoxL), YP_583446 |
| | Salmonella enterica subsp. enterica | (hoxL); |
| | serovar Weltevreden str. 2007-60-3289- | CBY95754 (hoxL); |
| | 1; Oligotropha carboxidovorans OM5; | YP_004638464 (hoxL); |
| | Oligotropha carboxidovorans OM4; | AEI04509 (hoxL); |
| | Azotobacter vinelandii DJ; | YP_002802118 (hoxL), |
| | | ACO81143 (hoxL); |
| | Methyloversatilis universalis FAM5; | ZP_08506137 (hoxL), EGK70316 |
| | | (hoxL); |
| | Ralstonia eutropha H16; | NP_942653 (hoxV), AAP85767 |
| | | (hoxV), AAA16471 (hoxV); |
| | Azotobacter vinelandii; | AAA19507 (hoxV); |
| | Oligotropha carboxidovorans OM5; | YP_015636 (HoxV); |
| | Cupriavidus metallidurans CH34; | ABF08172 (hoxV); |
| | Azotobacter vinelandii DJ; | YP_002802113 (hoxV); |
| | Cupriavidus metallidurans CH34; | YP_583441 (hoxV); |
| | Methyloversatilis universalis FAM5; | ZP_08506132 (hoxV); |
| | Methyloversatilis universalis FAM5; | EGK70311 (hoxV); |
| | Ralstonia eutropha H16 | NP_942647 (hoxM); |
| | Oligotropha carboxidovorans OM5, | YP_004638462 (hoxM); |
| | Oligotropha carboxidovorans OM4; | AEI04507 (hoxM); |
| | Azotobacter vinelandii; | AAA19501 (hoxM); |
| | Azotobacter vinelandii DJ; | YP_002802119 (hoxM); |
| | Cupriavidus metallidurans CH34; | YP_583447 (hoxM); |
| | Hydrogenobacter thermophilus TK-6; | BAF73673 (hoxM); |
| | Hydrogenobacter thermophilus TK-6; | YP_003432119 (hoxM); |
| | Thermoproteus tenax Kra 1; | CCC80713 (hoxM); |
| | Acidithiobacillus sp. GGI-221; | EGQ60729 (hoxM); |
| | Methyloversatilis universalis FAM5; | ZP_08506138 (hoxM); |
| | Burkholderiales bacterium 1_1_47; | ZP_07342912 (hoxM); |
| | Thiomonas intermedia K12; | YP_003644737 (hoxM); |
| | Thermococcus gammatolerans EJ3; | YP_002958602 |
| | | (hybD/hycI/hoxM); |
| | Ralstonia eutropha H16; | NP_942661 (hoxA), AAP85775; |
| | Azorhizobium caulinodans ORS 571; | AAS91037 (hoxA); |
| | Bradyrhizobium japonicum; | CAA78991 (hoxA); |
| | Hyphomicrobium sp. MC1; | YP_004674255 (hoxA); |
| | Azoarcus sp. BH72; | YP_935307 (hoxA); |
| | Methyloversatilis universalis FAM5; | ZP_08506123 (hoxA); |
| | Grimontia hollisae CIP 101886; | ZP_06053565 (hoxA); |
| | Oxalobacteraceae bacterium; | ZP_08276168 (hoxA); |
| | Ralstonia eutropha H16; | NP_942662 (hoxB), AAP85776; |
| | Azoarcus sp. BH72; | YP_935309 (hoxB); |
| | Oligotropha carboxidovorans OM5; | YP_004638467 (hoxB); |
| | Ralstonia eutropha H16; | AAP85777 (hoxC), NP_942663; |
| | Azoarcus sp. BH72; | YP_935310 (hoxC); |
| | Oligotropha carboxidovorans OM4; | AEI04502 (hoxC); |
| | Oligotropha carboxidovorans OM5; | YP_004638457 (hoxC); |
| | Oxalobacteraceae bacterium | ZP_08276171 (hoxJ), EGF30361 |
| | IMCC9480; | (hoxJ); |
| | Alcaligenes hydrogenophilus; | AAB49362 (hoxJ); |
| | Synechocystis sp. PCC 6803; | BAA18357 (hypA); |
| | Ralstonia eutropha H16; | NP_942654 (hypA1); |
| | Ralstonia eutropha H16; | NP_942733 (hypA2); |
| | Ralstonia eutropha H16; | NP_942716 (hypA3); |
| | Cupriavidus metallidurans CH34; | YP_583440 (hypA); |
| | Ralstonia eutropha H16; | NP_942655 (hypB1); |
| | Ralstonia eutropha H16; | AAP85769 (hypB1); |
| | Butyrivibrio proteoclasticus B316; | YP_003830670 (hypB1); |
| | Oligotropha carboxidovorans OM5; | YP_004638455 (hypB); |
| | Oligotropha carboxidovorans OM4; | AEI04500 (hypB); |
| | Desulfitobacterium metallireducens | ZP_08976390 (hypB), |
| | DSM 15288; | EHC20145 (hypB); |
| | Synechocystis sp. PCC 6803; | BAA18180 (hypC); |
| | Cyanothece sp. CCY0110; | EAZ91066 (hypC); |
| | Cupriavidus metallidurans CH34, | ABF08421(hypC); |
| | Ralstonia eutropha H16; | NP_942657 (hypC1); |
| | Ralstonia eutropha H16; | AAP85826 (hypC2); |
| | Ralstonia eutropha H16; | CAA49734 (hypD); |
| | Cupriavidus metallidurans CH34; | YP_583436 (hypD); |
| | Cupriavidus metallidurans CH34; | ABF08422 (hypD); |
| | Escherichia coli BL21(DE3); | ACT44398 (hypD); |
| | Synechocystis sp. PCC 6803; | BAA17478 (hypE); |
| | Ralstonia eutropha H16; | CAA49735 (hypE); |
| | Ralstonia eutropha H16; | NP_942659 (hypE1); |
| | Ralstonia eutropha H16; | AAP85829 (hypE2); |
| | Rhizobium leguminosarum; | CAA37164 (hypE); |
| | Azotobacter vinelandii; | AAA19513 (hypE); |
| | Aeropyrum pernix K1; | NP_148343 (hypE); |
| | Sulfolobus solfataricus P2; | NP_341628 (hypE); |
| | Hydrogenobacter thermophilus TK-6; | YP_003432665 (hypE); |
| | Pelotomaculum thermopropionicum SI; | YP_001212249 (hypE); |
| | Syntrophothermus lipocalidus DSM | ADI01176 (hypE), |
| | 12680; | YP_003701741 (hypE); |
| | Hydrogenobacter thermophilus TK-6; | YP_003432667 (hypF); |
| | Pelotomaculum thermopropionicum SI; | YP_001212246 (hypF); |
| | Syntrophothermus lipocalidus DSM | ADI01173 (hypF), |
| | 12680; Caldicellulosiruptor bescii DSM | YP_003701738 (hypF); |
| | 6725; | YP_002572964 (hypF); |
| | Ralstonia eutropha H16; | CAA49731 (hypF); |
| | Ralstonia eutropha H16; | NP_942660 (hypX); |
| | Ralstonia eutropha H16; | AAP85774 (hypX) |
| | Hydrogenobacter thermophilus TK-6; | YP_003433460 (hypX); |
| | Rhizobium leguminosarum; | CAA37165 (hypX); |
| | Methyloversatilis universalis FAM5; | ZP_08506124 (hoxX); |
| | Cupriavidus metallidurans CH34; | ABF08424 (hoxX); |
| | Ralstonia eutropha H16; | CAA52735 (hoxX); |
| 73: | Desulfobulbus propionicus DSM 2032; | ADY56959, YP_004195043; |
| NAD(P)-dependent | Acetohalobium arabaticum DSM 5501; | YP_003826884; |
| hydrogenase | Ilyobacter polyt; ropus DSM 2926; beta | ADO82414; |
| | proteobacterium KB13 | EDZ65062, ZP_05082375; |
| | Acetohalobium arabaticum DSM 5501; | ADL11819 |
| 74: | Moorella thermoacetica ATCC 39073; | YP_429324, ABC18781; |
| Formate dehydrogenase | Moorella thermoacetica ATCC 39073; | YP_431142, ABC20599; |
| using NAD(P)H | Moorella thermoacetica; | AAB18330 (α), AAB18329 (β); |
| | Methanosaeta harundinacea 6Ac; | AET63712, AET63711, |
| | Methanoculleus marisnigri JR1; | YP_001047290; |
| | Methanocorpusculum labreanum Z; | YP_001029904, YP_001029903; |
| | Helicobacter bilis ATCC 43879; | ZP_04582064 (NADPH); |
| | Helicobacter bilis ATCC 43879; | EEO23341 (NADPH); |
| | Pelotomaculum thermopropionicum SI; | YP_001213196; |
| | Hydrogenobacter thermophilus TK-6; | YP_003432807; |
| | Hydrogenobacter thermophilus TK-6; | YP_003433330 (NDA dependent); |
| | Klebsiella variicola At-22; | ADC58081, YP_003439113; |
| | Azospirillum sp. B510; | YP_003451652, YP_003450092; |
| | Thermococcus gammatolerans EJ3; | YP_002958615; |
| | Yersinia pestis Antiqua; | ABG15899; |
| | Thermofilum pendens Hrk 5; | YP_919603; |
| | Ferrimonas balearica DSM 9799; | YP_003913071; |
| | Thermodesulfatator indicus DSM | AEH46025; |
| | 15286; Shewanella baltica BA175; | AEG12633; |
| | Methanocella paludicola SANAE; | YP_003357462, YP_003357461; |
| | Methanosaeta harundinacea 6Ac; | AET64643, AET64987, |
| | | AET65705; |
| 75: | Moorella thermoacetica ATCC 39073; | YP_428991; |
| 10-Formyl-H₄ folate | Methanocorpusculum labreanum Z; | YP_001030445; |
| synthetase (ADP | Sphingomonas paucimobilis; | BAD61061; |
| forming, 10- | Desulfatibacillum alkenivorans AK-01; | ACL05327; |
| Formyltetrahydrofolate | Corynebacterium aurimucosum; | YP_002834788; |
| Synthetase) | Clostridium acidurici; | AAA53187; |
| | Sphingobium sp. SYK-6; | YP_004834408; |
| | Listeria monocytogenes serotype 4b str. | YP_002758587; |
| | CLIP 80459; Vibrio fischeri MJ11; | YP_002156619; |
| | Anoxybacillus flavithermus WK1; | YP_002315932; |
| | Thermotoga lettingae TMO; | YP_001471133; |
| | Fervidobacterium nodosum Rt17-B1; | YP_001410584; |
| | Thermosipho melanesiensis BI429; | YP_001305561; |
| | Thermotoga petrophila RKU-1 | YP_001244647 |
| | Pelotomaculum thermopropionicum SI; | YP_001210750; |
| 76: | Moorella thermoacetica ATCC 39073; | YP_430368, ABC19825; |
| 5,10-Methenyl-H₄ folate | Thermotoga lettingae TMO; | ABV34070; |
| cyclohydrolase | Caldicellulosiruptor bescii DSM 6725; | YP_002572856; |
| (Methenyltetrahydrofolate | Thermotoga petrophila RKU-1; | ABQ47072; |
| cyclohydrolase) | Anoxybacillus flavithermus WK1; | YP_002315305; |
| | Geobacillus kaustophilus HTA426; | BAD76681; |
| | Geobacillus kaustophilus HTA426; | YP_148249; |
| | Synechococcus sp. JA-2-3B′a(2-13); | YP_476354; |
| | Synechococcus sp. JA-3-3Ab; | YP_475381; |
| | Exiguobacterium sp. AT1b; | YP_002884899; |
| | Thermotoga lettingae TMO; | YP_001471134; |
| 77: | Moorella thermoacetica ATCC 39073; | ABC19825, YP_430368; |
| 5,10-Methylene-H₄ folate | Geobacillus kaustophilus HTA426; | BAD76681; |
| dehydrogenase | Syntrophothermus lipocalidus; | ADI01214; |
| | Caldicellulosiruptor kronotskyensis; | ADQ46551; |
| | Caldicellulosiruptor kristjanssonii; | ADQ40482; |
| | Caldicellulosiruptor hydrothermalis; | ADQ07463; |
| | Caldicellulosiruptor owensensis OL; | ADQ04336; |
| | Caldicellulosiruptor hydrothermalis; | YP_003992832; |
| | Kosmotoga olearia TBF 19.5.1; | ACR80790; |
| | Exiguobacterium sp. AT1b; | ACQ69454; |
| | Komagataella pastoris CBS 7435; | CCA37557; |
| | Homo sapiens; | AAH09806; |
| | Taeniopygia guttata; | XP_002200380; |
| | Syntrophobotulus glycolicus DSM 8271; | ADY56189; |
| | Olsenella uli DSM 7084; | ADK67906; |
| 78: | Moorella thermoacetica ATCC 39073; | YP_430048, ABC19505; |
| 5,10-Methylene-H₄ | Syntrophothermus lipocalidus; | ADI02156; |
| folate reductase | Fervidobacterium nodosum Rt17-B1; | ABS61421; |
| (Methylenetetrahydrofolate | Thermotoga petrophila RKU-1; | ABQ46674; |
| reductase) | Fervidobacterium nodosum Rt17-B1; | ABS61126; |
| | Thermotoga lettingae TMO; | ABV33918; |
| | Thermosipho melanesiensis BI429; | YP_001305980; |
| | Synechococcus sp. JA-2-3B′a(2-13); | YP_477166; |
| | Hippea maritima DSM 10411; | YP_004340445; |
| | Spirochaeta thermophila DSM 6192; | YP_003875363; |
| | Deferribacter desulfuricans SSM1; | YP_003496368; |
| | Hydrogenobacter thermophilus TK-6; | YP_003432279; |
| | Pelotomaculum thermopropionicum SI; | BAF59187, YP_001211556; |
| 79: | Moorella thermoacetica ATCC 39073; | YP_430950, YP_430174; |
| Methyl-H₄ folate: corrinoid | Pelotomaculum thermopropionicum SI; | YP_001211554; |
| iron-sulfur protein | Clostridium carboxidivorans P7; | ADO12092; |
| Methyltransferase | Desulfitobacterium hafniense DCB-2; | YP_002461301; |
| (Methyltetrahydrofolate:corrinoid/ | Dinoroseobacter shibae DFL 12; | YP_001533020; |
| iron-sulfur protein | Ammonifex degensii KC4; | YP_003238352; |
| Methyltransferase) | Desulfotomaculum acetoxidans; | YP_003190781; |
| | Rhodobacter sphaeroides KD131; | YP_002525435; |
| | Carboxydothermus hydrogenoformans; | YP_360065; |
| | Rhodobacter sphaeroides 2.4.1; | YP_352826; |
| | Heliobacterium modesticaldum Ice1; | YP_001680302; |
| | Sinorhizobium meliloti 1021; Acetonema | NP_386092; |
| | longum DSM 6540 | ZP_08625620; |
| 80: | Moorella thermoacetica; | AAA23255; |
| Corrinoid iron-sulfur protein | Carboxydothermus hydrogenoformans | 2H9A_A, 2H9A_B; |
| (CFeSP) | Clostridium ragsdalei; | AEI90763, AEI90762; |
| | Clostridium autoethanogenum; | AEI90746, AEI90745; |
| | Clostridium sticklandii DSM 519; | YP_003936194; |
| | Clostridium sticklandii; | CBH21289; |
| 81: | Moorella thermoacetica ATCC 39073; | ABC19516, YP_430059; |
| CO dehydrogenase/acetyl- | Moorella thermoacetica ATCC 39073; | YP_430813 (CODH); |
| CoA synthase (Fd²⁻) | Moorella thermoacetica; | AAA23229, AAA23228; |
| | Caldicellulosiruptor kristjanssonii; | ADQ39747; |
| | Caldicellulosiruptor saccharolyticus; | YP_001179230; |
| | Clostridium ragsdalei; | AEI90761; |
| | Clostridium autoethanogenum; | AEI90744; |
| | Desulfosporosinus orientis DSM 765; | AET68776; |
| | Methanococcus aeolicus Nankai-3; | ABR56750; |
| | Desulfobacca acetoxidans DSM 11109; | YP_004370981; |
| | Thermodesulfatator indicus; | AEH46031; |
| | Acetohalobium arabaticum DSM 5501; | ADL12817; |
| | Desulfarculus baarsii DSM 2075; | YP_003806211; |
| | Archaeoglobus veneficus SNP6; | YP_004341848; |
| | Methanosalsum zhilinae DSM 4017; | AEH60991; |
| | Thermosediminibacter oceani; | ADL07576; |
| | Desulfotomaculum kuznetsovii; | YP_004517493, YP_004516875; |
| | Methanosalsum zhilinae DSM 4017; | AEH60989, AEH60993; |
| 82: | Thermodesulfobium narugense; | YP_004437266; |
| Pyruvate synthase (Fd²⁻) | Desulfobacca acetoxidans; | YP_004370392; |
| | Archaeoglobus veneficus SNP6; | YP_004341929; |
| | Hippea maritima DSM 10411; | YP_004339618; |
| | Desulfurobacterium | YP_004281767, YP_004281766, |
| | thermolithotrophum; | ADY73708; |
| | Archaeoglobus veneficus; | AEA47214; |
| | Thermodesulfobium narugense; | AEE14134; |
| | Archaeoglobus veneficus SNP6; | YP_004341930; |
| | Thermobacillus composti KWC4; | ZP_08918406; |
| | Desulfobacca acetoxidans; | AEB09210; |
| | Methanolinea tarda NOBI-1; | EHF09898; |
| | Methanobacterium sp. AL-21; | YP_004289712, ADZ08740; |
| | Methanocella paludicola SANAE; | YP_003356312, YP_003356313; |
| 83: | Methanothermobacter marburgensis str. | ADL58895, ADL58894, |
| Formylmethanofuran | Marburg; | ADL58283, ADL58893, |
| dehydrogenase (Fmd) (Fd²⁻) | | ADL57751, ADL57749, |
| | | ADL57750, ADL57748; |
| | Methanothermobacter | CAA66401, CAA61212, |
| | thermautotrophicus; | CAA66400, CAA66402; |
| | Methanothermobacter | CAA61213, CAA61214, |
| | thermautotrophicus; | CAA61210, CAA61211, |
| | | CAA61209; |
| | Agrobacterium sp. H13-3; | YP_004444030; |
| | Agrobacterium vitis S4; | YP_002547540; |
| | Methylomonas methanica MC09; | YP_004511613; |
| | Desulfobacca acetoxidans DSM 11109; | YP_004370144, AEB08963; |
| | Methylovorus glucosetrophus SIP3-4; | YP_003051278; |
| | Methylotenera mobilis JLW8; | YP_003048298; |
| | Methylotenera versatilis 301; | ADI29297; |
| | Methanoculleus marisnigri JR1; | YP_001046285, YP_001046287, |
| | | YP_001046533; |
| | Methanosaeta harundinacea 6Ac; | AET63761, AET64650, |
| | | AET65189, AET64652; |
| | Methanosphaera stadtmanae; | ABC56660, ABC56659, |
| | | YP_447302, ABC56661, |
| | | ABC56658, ABC56657; |
| 84: | Methanothermobacter marburgensis str. | ADL59225, |
| Formyl transferase | Marburg; | YP_003850538; |
| | Methanosaeta harundinacea 6Ac; | AET65566; |
| | Methanosarcina barkeri; | CAA62582; |
| | Methanopyrus kandleri AV19; | NP_614099; |
| | Thermosipho melanesiensis BI429; | YP_001305762; |
| | Desulfobacca acetoxidans DSM 11109; | YP_004369335; |
| | Methylobacterium chloromethanicum; | YP_002421530; |
| | Methylomicrobium alcaliphilum; | YP_004917963; |
| | Methanopyrus kandleri AV19; | NP_613403; |
| | Methanoculleus marisnigri JR1; | YP_001046543; |
| | Methanocorpusculum labreanum Z; | YP_001029658, YP_001029834; |
| | Methanopyrus kandleri AV19; | AAM02029, AAM01333; |
| | Methanocella paludicola SANAE; | YP_003356088, BAI61105; |
| 85: | Methanosphaera stadtmanae; | ABC57615, YP_448258; |
| 5,10-Methenyl- | Methanothermus fervidus DSM 2088; | YP_004003819; |
| tetrahydromethanopterin (H4 | Methanosalsum zhilinae DSM 4017; | AEH61193; |
| methanopterin) | Methanohalophilus mahii DSM 5219; | ADE36644; |
| cyclohydrolase | Methanoplanus petrolearius; | ADN34846; |
| | Archaeoglobus veneficus SNP6; | YP_004342719; |
| | Planctomyces brasiliensis DSM 5305; | YP_004269775; |
| | Methylobacillus flagellates; | AAD55893; |
| | Xanthobacter autotrophicus; | AAD55896; |
| | Methylosinus trichosporium OB3b; | AAD56174; |
| | Methylobacterium organophilum; | AAD55900; |
| | Methylococcus capsulatus; | AAD55899; |
| | Methylomicrobium kenyense; | AAS88982; |
| | Methylomonas sp. LW13; | AAS88987; |
| | Methylosinus sp. LW2; | AAS88975; |
| | Methylomicrobium kenyense; | AAS86344; |
| | Methanohalophilus mahii DSM 5219; | YP_003542289; |
| | Methanolinea tarda NOBI-1; | EHF09908; |
| | Methanothermococcus okinawensis IH1; | YP_004577331; |
| | Methanobacterium sp. SWAN-1; | YP_004519292; |
| | Methylomonas methanica MC09; | YP_004513168; |
| 86: | Methanothermobacter marburgensis; | ADL57660, YP_003848973; |
| 5,10-Methylene-H₄- | Methanosphaera stadtmanae; | YP_447224; |
| methanopterin | Methanococcus maripaludis X1; | AEK19019; |
| dehydrogenase (F₄₂₀H₂) | Methanothermobacter | CAA63376; |
| | thermautotrophicus; | |
| | Methanopyrus kandleri; | CAA43127; |
| | Methylobacterium extorquens AM1; | AAC27020; |
| | Methylobacillus flagellatus KT; | ABE49928; |
| | Xanthobacter autotrophicus; | AAD55895; |
| | Methyloversatilis universalis FAM5; | ZP_08504846; |
| | Methylobacterium chloromethanicum; | ACK83011; |
| | Methylobacterium populi BJ001; | YP_001924478; |
| | Methylobacterium extorquens PA1; | YP_001639299; |
| | Burkholderia sp. CCGE1001; | YP_004230417; |
| | Methylovorus sp. MP688; | YP_004039958; |
| | Methanocaldococcus fervens AG86; | YP_003128308; |
| | Methanocaldococcus jannaschii; | NP_247770; |
| | Methanobrevibacter smithii; | YP_001273145; |
| 87: | Methanoplanus petrolearius; | ADN36752; |
| 5,10-Methylene-H₄- | Methanocaldococcus sp. FS406-22; | YP_003458803; |
| methanopterin reductase | Methanocaldococcus infernus ME; | ADG13507; |
| (F₄₂₀H₂) | Methanocaldococcus fervens AG86; | ACV24808; |
| | anococcus maripaludis C6; | ABX01642; |
| | Stenotrophomonas sp. SKA14; | EED39154, ZP_05135093; |
| | Amycolatopsis mediterranei S699; | AEK43785; |
| | Corynebacterium glutamicum; | EHE83474; |
| | Acinetobacter sp. DR1; | ADI90167; |
| | Acinetobacter baumannii ABNIH4; | EGU03459; |
| | Acinetobacter sp. DR1; | YP_003731540; |
| | Paenibacillus terrae HPL-003; | AET61191; |
| | Acinetobacter baumannii ABNIH3; | EGT94264; |
| | Cupriavidus necator N-1; | AEI79563; |
| | Herbaspirillum seropedicae SmR1; | YP_003777169; |
| | Burkholderia cenocepacia HI2424; | YP_840196; |
| | Methanobrevibacter ruminantium M1; | YP_003423269, ADC46377; |
| | Methanococcus voltae A3; | ADI37005; |
| | Methanococcus aeolicus Nankai-3; | ABR56603; |
| | Methanocaldococcus vulcanius M7; | ACX71899; |
| 88: | Methanothermobacter marburgensis; | MTBMA_c02920; |
| Methyl-H4-methanopterin: | Methanothermobacter marburgensis str. | ADL57900; |
| corrinoid iron-sulfur protein | Marburg; | |
| methyltransferase | | |
| 89: | Methanothermobacter marburgensis; | MTBMA_c02910; |
| Corrinoid iron-sulfur protein | Methanothermobacter marburgensis str. | ADL57899; |
| (MTBMA_c02910) | Marburg; | |
| 90: | Methanothermobacter marburgensis; | αMTBMA_c02870/14220/14210/ |
| CO dehydrogenase/acetyl- | | 14200; |
| CoA synthase (Fd²⁻_{red}) | | ε MTBMA_c14190/02880; |
| | | βMTBMA_c02890; |
| | Methanothermobacter marburgensis str. | ADL57895; |
| | Marburg; | ADL59006; |
| | | ADL57897; |
| 91: | Methanosphaera stadtmanae; | ABC57827 (ehbA); |
| Energy converting | Methanosphaera stadtmanae; | ABC57826 (ehbB); |
| hydrogenase (Ech) | Methanosphaera stadtmanae; | ABC57825 (ehbC); |
| | Methanosphaera stadtmanae; | ABC57824 (ehbD); |
| | Methanosphaera stadtmanae; | ABC57823 (ehbE); |
| | Methanosphaera stadtmanae; | ABC57822 (ehbF); |
| | Methanosphaera stadtmanae; | ABC57821 (ehbG); |
| | Methanosphaera stadtmanae; | ABC57820 (ehbH); |
| | Methanosphaera stadtmanae; | ABC57819 (ehbI); |
| | Methanosphaera stadtmanae; | ABC57818 (ehbJ); |
| | Methanosphaera stadtmanae; | ABC57817 (ehbK); |
| | Methanosphaera stadtmanae; | ABC57816 (ehbL); |
| | Methanosphaera stadtmanae; | ABC57815 (ehbM); |
| | Methanosphaera stadtmanae; | ABC57814 (ehbN); |
| | Methanosphaera stadtmanae; | ABC57813 (ehbO); |
| | Methanosphaera stadtmanae; | ABC57812(ehbP); |
| | Methanosphaera stadtmanae; | ABC57807 (ehbQ); |
| | Methanothermobacter marburgensis; | ADL59203, YP_003850516; |
| | Methanobacterium sp. SWAN-1; | YP_004520980; |
| | Methanobrevibacter ruminantium M1; | YP_003424741, ADC47849; |
| 92: | Methanosphaera stadtmanae; | ABC56714 (mtrA); |
| Methyl-H4MPT: coenzyme | Methanosphaera stadtmanae; | ABC56713 (mtrB); |
| M methyltransferase (MtrA- | Methanosphaera stadtmanae; | YP_447355 (mrtC); |
| H) | Methanosphaera stadtmanae; | YP_447354 (mtrD); |
| | Methanosaeta harundinacea 6Ac; | AET65445 (mtrE); |
| | Methanopyrus kandleri AV19; | AAM01871 (mtrE); |
| | Methanoculleus marisnigri JR1; | YP_001046527 (mtrE); |
| | Methanoculleus marisnigri JR1 | YP_001046522 (mtrF); |
| | Methanopyrus kandleri AV19; | NP_614768 (mtrF); |
| | Methanosphaera stadtmanae; | YP_447359 (mtrG); |
| | Methanosphaera stadtmanae; | YP_447360 (mtrH); |
| | Archaeoglobus fulgidus DSM 4304; | NP_068850 (mtrH); |
| | Methanopyrus kandleri AV19; | AAM01874 (mtrB); |
| | Methanocella paludicola SANAE; | BAI60614 (mtrB); |
| | Methanosaeta harundinacea 6Ac; | AET65448 (mtrB); |
| | Methanoculleus marisnigri JR1; | YP_001046524 (mtrB); |
| | Methanocella paludicola SANAE; | YP_003355598 (mtrA); |
| | Methanocella paludicola SANAE; | YP_003355597 (mtrB); |
| | Methanocella paludicola SANAE; | YP_003355596 (mtrC); |
| | Methanocella paludicola SANAE; | YP_003355595 (mtrD); |
| | Methanocella paludicola SANAE; | YP_003355594 (mtrE); |
| | Methanocella paludicola SANAE; | BAI60616 (mtrF); |
| | Methanocella paludicola SANAE; | YP_003355600 (mtrG); |
| | Methanocella paludicola SANAE; | YP_003355601 (mtrH); |
| 93: | Methanobacterium aarhusense; | AAR27839 (mcrA); |
| Methyl-coenzyme M | Methanobacterium sp. MB4; | ABG78755 (mcrA); |
| reductase (Mcr) | Methanosphaera stadtmanae; | CAE48306 (mcrA) |
| | Methanosphaera stadtmanae; | CAE48303 (mcrB) |
| | Methanosphaera stadtmanae; | ABC56709 (mcrC); |
| | Methanosphaera stadtmanae; | CAE48305 (McrG) |
| | Methanosphaera stadtmanae; | ABC56731, ABC56728; |
| | Methanosphaera stadtmanae; | YP_447371, ABC56730 (mrtG); |
| | Methanosphaera stadtmanae; | ABC56794; |
| 94: | Methanocella paludicola SANAE; | YP_003357823 (hdrA); |
| Heterodisulfide reductases | Methanocella paludicola SANAE; | YP_003357824 (hdrB); |
| (HdrABC, HdrDE) | Methanocella paludicola SANAE; | YP_003357825 (hdrC) |
| | Methanosaeta harundinacea 6Ac; | AET63985 (hdrA); |
| | Methanosaeta harundinacea 6Ac; | AET63982 (hdrB); |
| | Methanosaeta harundinacea 6Ac; | AET63983 (C); |
| | Methanosaeta harundinacea 6Ac; | AET64166 (D); |
| | Methanosaeta harundinacea 6Ac; | AET64165 (E); |
| | Methanopyrus kandleri AV19; | NP_613552 (hdrA); |
| | Methanopyrus kandleri AV19; | NP_613857 (hdrB); |
| | Methanopyrus kandleri AV19; | NP_613858 (hdrC); |
| 95: | Methanosphaera stadtmanae; | ABC56726 (mvhA); |
| [NiFe]-hydrogenase | Cyanobium sp. PCC 7001; | EDY38497 (mvhA); |
| MvhADG (non-F420 | Methanothermobacter marburgensis; | ADL59096 (mvhA) |
| reducing hydrogenase; | Methanobrevibacter ruminantium M1; | YP_003424648 (mvhA); |
| methyl viologen-reducing | Desulfobacterium autotrophicum HRM2 | YP_002602450 (mvhA) |
| hydrogenase) | Desulfatibacillum alkenivorans AK-01; | ACL06634 (mvhA); |
| | Methanothermobacter marburgensis; | ADL59095 (mvhB); |
| | Desulfatibacillum alkenivorans AK-01; | ACL06636 (mvhB); |
| | Methanobrevibacter smithii DSM 2374; | ZP_05975561 (mvhB); |
| | Methanothermobacter marburgensis; | ADL59098 (mvhD); |
| | Methanothermobacter marburgensis; | YP_003850411 (mvhD); |
| | Methanobrevibacter smithii; | YP_001273574 (mvhD); |
| | Methanobrevibacter smithii; | ABQ87206 (mvhD); |
| | Methanothermobacter | AAB02349 (mvhD); |
| | thermautotrophicus; | |
| | Methanothermobacter marburgensis; | ADL59097 (mvhG); |
| | Desulfatibacillum alkenivorans AK-01; | ACL06635 (mvhG); |
| | Cyanobium sp. PCC 7001; | EDY38425 (mvhG); |
| | Methanosphaera stadtmanae; | ABC56725 (mvhG); |
| | Methanobrevibacter smithii DSM 2374; | EFC93226 (mvhG); |
| | Desulfatibacillum alkenivorans AK-01; | ACL06638; |
| | Desulfatibacillum alkenivorans AK-01; | ACL03322; |
| | Methanoculleus marisnigri JR1; | YP_001046332 (hypF); |
| 96: | Methanocella paludicola SANAE; | YP_003357229 (frhB-1); |
| Coenzyme F420-reducing | Methanocella paludicola SANAE; | YP_003357467 (frhB-2); |
| hydrogenase (Frh) | Methanocella paludicola SANAE; | YP_003357509 (frhB-3); |
| | Synechococcus elongatus PCC 7942; | ABB57389 (frhB); |
| | Synechocystis sp. PCC 6803; | BAA18574, YP_001735870; |
| | Synechococcus sp. WH 7803; | YP_001225273; |
| | Synechococcus sp. RCC307; | YP_001227030; |
| | Cyanothece sp. PCC 8802; | ACV00312 (frhB); |
| | Cyanobium sp. PCC 7001; | EDY39891 (fehB); |
| | Synechococcus sp. RS9916; | EAU74116 (frhB); |
| | Synechococcus sp. JA-2-3B′a(2-13); | YP_477499; |
| | Pelotomaculum thermopropionicum SI; | YP_001212042, YP_001211959; |
| | Methanothermus fervidus DSM 2088; | YP_004004590; |
| | Methanococcus maripaludis S2; | CAF30376 (A), NP_988502 (A); |
| | Methanococcus maripaludis S2; | NP_988505 (B); |
| | Methanococcus maripaludis S2; | NP_988503 (D); |
| | Methanococcus maripaludis S2; | NP_988504 (G); |
| 97: | Methanobrevibacter ruminantium M1; | YP_003423444 (ahaA); |
| A₁Aₒ-ATP synthase (AhaA- | Methanobrevibacter ruminantium M1; | YP_003423445 (ahaB); |
| IK) | Methanobrevibacter ruminantium M1; | YP_003423442 (ahaC); |
| | Methanobrevibacter ruminantium M1 | ADC46554 (ahaD); |
| | Methanobrevibacter ruminantium M1; | ADC46549 (ahaE); |
| | Methanobrevibacter ruminantium M1; | YP_003423443 (ahaF); |
| | Methanobrevibacter ruminantium M1; | YP_003423438 (ahaH) |
| | Methanobrevibacter ruminantium M1; | ADC46547 (ahaI); |
| | Methanobrevibacter ruminantium M1; | YP_003423440 (ahaK); |
| | Ferroplasma acidarmanus fer1; | ZP_05570724; |
| | Thermococcus sibiricus MM 739; | YP_002995194; |
| | Thermoproteus tenax Kra 1; | CCC82573; |
| | Thermoproteus tenax Kra 1; | CCC82176; |
| | Methanosarcina mazei Go1; | AAC06375 (ahaA); |
| | Methanosarcina mazei Go1; | AAC06376 (ahaB); |
| | Methanosarcina mazei Go1; | AAC06373 (ahaC); |
| | Methanosarcina mazei Go1; | AAC06377 (ahaD) |
| | Methanosarcina mazei Go1; | AAC06372 (ahaE); |
| | Methanosarcina mazei Go1; | AAC06374 (ahaF); |
| | Methanosarcina mazei Go1; | AAC06378 (ahaG); |
| 98: | Methanosarcina mazei Go1; | CAA58177 (mhtA); |
| Membrane bound | Methanosarcina acetivorans C2A; | NP_616088 (mhtA); |
| cytochrome-containing F420- | Archaeoglobus fulgidus DSM 4304; | NP_070209 (mhtA); |
| nonreducing hydrogenase | Ferroglobus placidus DSM 10642; | ADC65001 (mhtA); |
| (VhtGAC, VhtD) | Methanosarcina acetivorans C2A; | NP_616088 (mhtB); |
| | Archaeoglobus fulgidus DSM 4304; | NP_070209 (mhtB); |
| | Methanosarcina mazei Go1; | CAA58178 (mhtB); |
| | Methanocella paludicola SANAE; | YP_003357991 (mhtC); |
| | Methanosarcina acetivorans C2A; | NP_616084(mhtC); |
| | Methanosarcina mazei Go1; | CAA58178 (nhtC); |
| | Methanosarcina mazei Go1; | NP_634195 (mhtC); |
| | Methanosarcina acetivorans C2A; | AAM04564 (mhtC); |
| | Methanosarcina mazei Go1; | CAA62962 (nhtD); |
| | Methanocella paludicola SANAE; | YP_003355429 (mhtD); |
| | Methanosarcina acetivorans C2A; | NP_616085 (mhtD); |
| | Methanosarcina acetivorans C2A; | NP_616087 (mhtG); |
| | Methanosarcina mazei Go1; | CAA581769 (mhtG); |
| | Methanocella paludicola SANAE; | YP_003357989 (mhtG); |
| | Methanosarcina acetivorans C2A; | AAM04562 (mhtG); |
| | Archaeoglobus fulgidus DSM 4304; | AAB89863 (mhtG); |
| 99a: | Methanobrevibacter ruminantium M1; | YP_003423415 (cofA); |
| CofA: Lactaldehyde | Methanobrevibacter ruminantium M1; | ADC46523 (cofA); |
| dehydrogenase (for F₄₂₀ | Methanothermococcus okinawensis IH1; | YP_004576675; |
| synthesis) | Methanotorris igneus Kol 5; | YP_004484309; |
| | Methanolinea tarda NOBI-1; | EHF10591; |
| | Methanobacterium sp. SWAN-1; | YP_004520759; |
| | Methanobacterium sp. AL-21; | YP_004289639; |
| | Methanolinea tarda NOBI-1; | ZP_09042363; |
| 99b: | Methanothermobacter marburgensis; | cofB; |
| CofB: L-Lactate kinase (for | Methanothermobacter | cofB; |
| F₄₂₀ synthesis) | thermautotrophicus | |
| 99c: | Methanothermobacter marburgensis; | ADL58588; |
| CofC: 2-phospho-L-lactate | Haloquadratum walsbyi C23; | CCC41432; |
| guanylyltransferase (for F₄₂₀ | Methanobrevibacter ruminantium M1; | YP_003423696; |
| synthesis) | Archaeoglobus veneficus SNP6; | YP_004342334; |
| | Natronobacterium gregoryi SP2; | ZP_08967286; |
| | Methanosalsum zhilinae DSM 4017; | AEH61444; |
| | Methanoplanus petrolearius; | ADN35493; |
| | Methanolinea tarda NOBI-1; | EHF10295; |
| 99d: | Methanococcus maripaludis S2; | NP_987524; |
| CofD: LPPG:Fo 2-phospho- | Archaeoglobus veneficus SNP6; | YP_004341066; |
| L-lactate transferase (for F₄₂₀ | Methanospirillum hungatei JF-1; | YP_503864; |
| synthesis) | Methanococcus maripaludis XI; | YP_004742044; |
| | Methanocella paludicola SANAE; | YP_003356970; |
| | Methanosphaera stadtmanae; | YP_448417; |
| | Methanopyrus kandleri AV19; | NP_614772; |
| | Methanoculleus marisnigri JR1; | YP_001048050; |
| | Methanosaeta harundinacea 6Ac; | AET64321; |
| | Methanocorpusculum labreanum Z; | YP_001029596; |
| | Methanococcus maripaludis S2; | CAF29960; |
| 99e: | Methanothermobacter | NP_276154; |
| CofE: F₄₂₀-0: gamma- | thermautotrophicus; | |
| glutamyl ligase | Methanocorpusculum labreanum Z; | YP_001030766; |
| (for F₄₂₀ synthesis) | Methanothermus fervidus DSM 2088; | YP_004003885; |
| | Methanohalophilus mahii DSM 5219; | ADE37403; |
| | Mycobacterium sp. Spyr1; | YP_004078486; |
| | Halogeometricum borinquense; | YP_004035572; |
| | Methanococcus maripaludis C5; | ABO35054; |
| | Methanosarcina barkeri str. Fusaro; | YP_305815; |
| | Methanocorpusculum labreanum Z; | YP_001030766; |
| | Methanococcoides burtonii DSM 6242; | YP_566482; |
| | Methanoculleus marisnigri JR1; | ABN57125; |
| | Methanosaeta thermophila PT; | ABK13958; |
| | Acidothermus cellulolyticus 11B | ABK53734; |
| 99f: | Methanobrevibacter ruminantium M1; | YP_003424716 (cofG); |
| CofGH: Fo synthase (for F₄₂₀ | Methanococcus maripaludis S2; | CAF30432 (cofG); |
| synthesis) | Methanosphaera stadtmanae; | YP_447349 (cofG) |
| | Methanocella paludicola SANAE; | YP_003357513 (cofG); |
| | Methanopyrus kandleri AV19; | NP_614181 (cofG); |
| | Synechococcus sp. PCC 7002; | YP_001734664 (cofG); |
| | Cyanothece sp. PCC 7425; | YP_002481576 (cofG); |
| | Synechococcus elongatus PCC 7942; | ABB56922 (cofG); |
| | Synechocystis sp. PCC 6803 | NP_440537 (cofG) |
| | Synechococcus elongatus PCC 7942; | YP_399705 (cofH); |
| | Synechocystis sp. PCC 6803; | NP_440146 (cofH); |
| | Thermosynechococcus elongatus BP-1; | NP_682387 (cofH); |
| | Cyanothece sp. ATCC 51472; | EHC24992 (cofH); |
| | Methanosphaera stadtmanae; | ABC56793 (cofH); |
| | Methanococcus maripaludis S2; | NP_987177 (cofH); |
| | Methanobrevibacter ruminantium M1, | YP_003424008 (cofH); |
| | Methanosarcina mazei Go1; | NP_634520 (cofH); |
| | Methanocella paludicola SANAE; | YP_003357511 (cofH); |
| 100: | Methanocella paludicola SANAE; | YP_003355454; |
| Pyridoxal phosphate- | Methanobrevibacter ruminantium M1; | YP_003424638; |
| dependent L-tyrosine | Thermococcus gammatolerans EJ3; | YP_002960503; |
| decarboxylase (mfnA for | Halobacterium salinarum R1; | YP_001688512; |
| methanofuran synthesis) | Methanothermobacter marburgensis; | ADL59079; |
| | Thermococcus gammatolerans EJ3; | ACS34639; |
| | Haloferax volcanii DS2; | YP_003534871; |
| 101a: | Methanosphaera stadtmanae; | YP_447347; |
| MptA: GTP cyclohydrolase | Methanobrevibacter ruminantium M1; | YP_003424704; |
| (for Methanopterin synthesis) | Methanococcus maripaludis S2; | NP_987154; |
| | Pyrococcus horikoshii OT3; | NP_143623; |
| | Thermococcus gammatolerans EJ3; | YP_002959796; |
| | Methanosarcina mazei Go1; | NP_633246; |
| | Methanospirillum hungatei JF-1; | YP_503757; |
| | Thermococcus kodakarensis KOD1; | YP_183206; |
| | Methanopyrus kandleri AV19; | NP_613770; |
| | Methanosarcina acetivorans C2A; | NP_619377; |
| | Methanocaldococcus fervens AG86; | YP_003128348; |
| | Methanoregula boonei 6A8; | YP_001403641; |
| | Methanothermobacter | NP_276324; |
| | thermautotrophicus; | |
| | Methanosarcina barkeri str. Fusaro; | YP_304731; |
| | Methanocaldococcus jannaschii; | NP_247760; |
| 101b: | Methanococcus maripaludis C5; | ABO35741; |
| MptB: Cyclic | Roseobacter denitrificans OCh 114; | YP_683148; |
| phosphodiesterase | Arabidopsis thaliana; | AEE84108; |
| (for Methanopterin synthesis) | Zea mays; | NP_001151923; |
| | Medicago truncatula; | XP_003629873; |
| 101c: | Methanothermus fervidus DSM 2088; | YP_004003771; |
| RFAP: | Methanocella paludicola SANAE; | YP_003356610; |
| Ribofuranosylaminobenzene | Methanoplanus petrolearius; | ADN37264; |
| 5′-phosphate synthase (for | Methanobrevibacter ruminantium M1; | YP_003424432; |
| Methanopterin synthesis) | Archaeoglobus veneficus SNP6; | YP_004342012; |
| | Thermococcus sp. AM4; | YP_002582695; |
| | Methanococcus maripaludis S2; | NP_987399; |
| | Methanothermus fervidus DSM 2088; | ADP77009; |
| | Methanocella paludicola SANAE; | BAI61627; |
| 102a: | Methanothermobacter marburgensis; | ADL57861; |
| ComA: Phosphosulfolactate | Methanococcus maripaludis S2; | NP_987393; |
| synthase (for Coenzyme M | Methanosphaera stadtmanae; | ABC57647; |
| synthesis) | Methanothermus fervidus DSM 2088; | YP_004004617; |
| | Methanothermococcus okinawensis IH1; | YP_004575938; |
| | Methanobacterium sp. SWAN-1; | YP_004519242; |
| | Methanocaldococcus fervens AG86; | YP_003127444; |
| | Methanococcus voltae A3; | ADI36986; |
| | Methanococcus maripaludis C6; | YP_001548728; |
| | Methanobacterium sp. AL-21; | YP_004291430; |
| | Methanococcus aeolicus Nankai-3; | YP_001324357; |
| | Methanotorris igneus Kol 5; | AEF96400; |
| | Methanobacterium sp. AL-21 | ADZ10458; |
| | Methanococcus maripaludis X1; | AEK19167; |
| | Methanocaldococcus infernus ME; | ADG13665; |
| | Methanocaldococcus sp. FS406-22; | YP_003457919; |
| 102b: | Methanococcus maripaludis S2; | NP_987281; |
| ComB: 2- | Methanopyrus kandleri AV19; | AAM01355; |
| Phosphosulfolactate | Methanothermobacter marburgensis; | YP_003850451; |
| phosphatase (for Coenzyme | Methanococcus maripaludis S2; | CAF29717; |
| M synthesis) | Methanocella paludicola SANAE; | YP_003357619 |
| | Methanothermus fervidus DSM 2088; | YP_004004784; |
| | Methanothermus fervidus DSM 2088; | ADP78022; |
| | Methanobacterium sp. AL-21; | YP_004289567; |
| | Methanobrevibacter ruminantium M1; | YP_003424691; |
| | Synechocystis sp. PCC 6803; | BAK50080; |
| | Synechococcus sp. JA-2-3B′a(2-13); | YP_476548; |
| | Synechococcus sp. PCC 7002; | YP_001735079; |
| | Synechococcus sp. WH 7803; | YP_001224757; |
| | Cyanothece sp. ATCC 51472; | EHC21417; |
| | Synechococcus sp. WH 8016; | ZP_08955317; |
| 102c: | Methanothermobacter marburgensis; | ADL59162; |
| ComC: Sulfolactate | Methanosphaera stadtmanae; | ABC56689; |
| dehydrogenase (for | Methanothermobacter marburgensis; | YP_003850475; |
| Coenzyme M synthesis) | Methanothermus fervidus DSM 2088; | YP_004003953; |
| | Roseobacter litoralis Och 149; | YP_004689622; |
| | Methanococcus maripaludis C5; | ABO34766; |
| | Methanothermus fervidus DSM 2088; | ADP77191; |
| 102d: | Methanosarcina acetivorans C2A; | NP_618188; |
| ComDE: Sulfopyruvate | Methanocella paludicola SANAE; | YP_003357048; |
| decarboxylase (for | Methanocorpusculum labreanum Z; | YP_001029945; |
| Coenzyme M synthesis) | Methanoculleus marisnigri JR1; | ABN56047; |
| | Methanosarcina barkeri str. Fusaro; | YP_306991; |
| | Methanocella paludicola SANAE; | BAI62065; |
| | Methanosphaera stadtmanae; | ABC56687; |
| | Methanococcus maripaludis S2; | NP_988809; |
| 102e: | Methanothermobacter marburgensis; | comF; |
| ComF: Sulfoacetaldehyde | Methanothermobacter | comF; |
| dehydrogenase (for | thermautotrophicus | |
| Coenzyme M synthesis) | | |
| 103a: | Methanopyrus kandleri AV19; | AAM01606; |
| LeuA homolog: | Methanothermobacter | AAB85956; |
| Isopropylmalate synthase | thermautotrophicus; | |
| (for Coenzyme B synthesis) | Thermoproteus tenax; | CAF18516; |
| | Thermoplasma volcanium GSS1; | NP_111428; |
| | Methanobrevibacter smithii; | ABQ87451; |
| | Methanosphaera stadtmanae; | YP_447259; |
| | Methanobrevibacter ruminantium M1; | YP_003424897; |
| | Methanococcus maripaludis S2; | NP_988183; |
| | Synechocystis sp. PCC 6803 | NP_442009; |
| | Synechococcus elongatus PCC 7942; | ABB56460; |
| | Cyanothece sp. ATCC 51472; | EHC25498; |
| | Synechococcus sp. WH 8016; | ZP_08954784; |
| | Synechococcus sp. JA-2-3B′a(2-13) | YP_477672; |
| | Thermosynechococcus elongatus BP-1; | NP_682187; |
| 103b: | Methanopyrus kandleri AV19; | NP_614498; |
| LeuB homolog: | Methanothermobacter marburgensis; | ADL58232; |
| Isopropylmalate | Methanothermus fervidus DSM 2088; | YP_004004146; |
| dehydrogenase (for | Methanocella paludicola SANAE; | YP_003358048; |
| Coenzyme B synthesis) | Methanosphaera stadtmanae; | YP_447715; |
| | Methanocella paludicola SANAE; | BAI63065; |
| | Methanococcus maripaludis S2; | CAF30095; |
| | Synechocystis sp. PCC 6803; | NP_441348; |
| | Synechococcus elongatus PCC 7942; | ABB57535; |
| | Cyanothece sp. ATCC 51472; | EHC23198; |
| | Synechococcus sp. JA-2-3B′a(2-13; | YP_477855; |
| | Thermosynechococcus elongatus BP-1; | NP_682390; |
| 103c: | Marinobacter adhaerens HP15; | ADP98363, ADP98362; |
| LeuCD homolog: | Halorhabdus tiamatea SARL4B; | ZP_08559069; |
| Isopropylmalate isomerase | Haloarcula marismortui ATCC 43049; | YP_135090; |
| (for Coenzyme B synthesis) | Halomicrobium mukohataei; | YP_003178469; |
| | Haladaptatus paucihalophilus DX253; | ZP_08045715; |
| | Escherichia coli O103:H2 str. 12009; | YP_003220086, YP_003220085; |
| | Synechocystis sp. PCC 6803; | NP_442926, NP_441618; |
| | Cyanothece sp. PCC 8801; | YP_002370476, YP_002373868; |
| | Nostoc sp. PCC 7120; | NP_485460, NP_485459; |
| | Synechococcus sp. JA-2-3B′a(2-13); | YP_478232, YP_476588; |
| | Thermosynechococcus elongatus BP-1; | NP_681699, NP_682024; |
| 104: | Thauera butanivorans; | AY093933; |
| σ⁵⁴-transcriptional activator | Zymomonas mobilis; | AEI37129, AEH62108; |
| (BmoR) | Pectobacterium wasabiae WPP163; | ACX88367; |
| | Marinomonas mediterranea MMB-1; | ADZ89640; |
| | Glaciecola sp. 4H-3-7+YE-5; | AEE22284; |
| | Rahnella sp. Y9602; | ADW74353; |
| | Pseudoalteromonas sp. ND6B; | KGJ99007; |
| | Colwellia psychrerythraea; | KGJ96343, KGJ93164; |
| | Escherichia coli KO11FL; | ADX51149; |
| | Pectobacterium carotovorum; | ACT13368; |
| | Dickeya dadantii Ech703; | ACS85518; |
| | Enterobacter cloacae str. Hanford; | EPR39571; |
| | Shewanella baltica; | AEH13482, ADT93851; |
| | Sphingobium chlorophenolicum L-1; | AEG49721; |
| | Hirschia baltica ATCC 49814; | ACT60594; |
| | Tolumonas auensis DSM 9187; | ACQ91718; |
| | Desulfomicrobium baculatum; | ACU89329; |
| | Enterobacter asburiae LF7a; | AEN65074; |
| | Serratia sp.; | AEG28401, AEF50694; |
| | Serratia plymuthica AS9; | AEF45743; |
| | Brenneria sp. EniD312; | EHD21179; |
| | Desulfovibrio africanus str. Walvis Bay; | EGJ49660; |
| | Desulfovibrio alaskensis G20; | ABB40021; |
| | Ralstonia eutropha; | AAZ64425, CAJ97131; |
| | Thermodesulfatator indicus; | AEH43902; |
| | Syntrophothermus lipocalidus; | ADI01014, ADI01359; |
| | Rhodopirellula baltica SWK14; | ELP35849, ELP32292; |
| | Thauera butanivorans; | ABU68842; |
| 105: | Cloning vector pKaKa2; | ADO63859; |
| λ-Red single-stranded DNA | Cloning vector pKaKa1; | ADO63841; |
| (ssDNA) binding protein β | Broad host range Red recombinase | AAV68245, ACJ06678; |
| | expression vector pRKcIRed; | ACJ06694, ACJ06689; |
| 106: | Geobacillus sp.; | JC8061; |
| Lipase | Pseudomonas fluorescens; | AAU10321; |
| | Rhodococcus erythropolis; | ACD89059; |
| | Brachybacterium tyrofermentans; | ACD89058; |
| | Enterobacter aerogenes (K. mobilis); | KHM31672, KHM31091; |
| | Enterobacter aerogenes; | WP_032716299, WP_032712977; |
| | Pseudomonas sp. XD; | ACD89057; |
| | Pseudomonas syringae; | ACD89056, EFW83541; |
| | Proteus sp. K107; | ACC76759; |
| | Rhizomucor miehei; | B34959; |
| | Rhizopus oryzae; | BAG16821, ACW84344; |
| | Paenibacillus polymyxa CR1; | AIW42352, YP_009097503; |
| | Fluviicola taffensis DSM 16823; | YP_004343248; |
| | Streptomyces coelicolor A3(2); | NP_625552; |
| | Candida Antarctica, | 3W9B_C, CAA83122 (Nov435); |
| | Rhizomucor miehei; | 4TGL_A; |
| | Pseudomonas sp. 7323; | CAJ76166; |
| | Pseudomonas fluorescens | BAC98499, BAC98498; |
| | Pseudomonas fluorescens | AAA25882 (can use butanol); |
| | Thermomyces lanuginosus; | ABV69592, ABV69591; |
| | Synechocystis sp. PCC 6714; | AIE72887; |
| | Arthrospira platensis; | KDR54344, WP_006623978; |
| | Cyanobium sp. CACIAM 14; | KEF43153; |
| | Nostoc sp. PCC 7107; | WP_006670868; |
| | Trichodesmium erythraeum; | WP_011611331; |
| | Thermosynechococcus elongatus BP-1; | NP_682772; |
| | Prochlorococcus marinus; | WP_032526888; |
| | Arthrospira maxima; | AFY45335; |
| | Auxenochlorella protothecoides; | KFM28616; |
| | Tetraselmis sp. GSL018; | JAC66493; |
| | Pseudomonas (Burkholderia) cepacia; | WP_027791175, M58494, |
| | | WP_034204948 (use ethanol); |
| 107: | Chlamydomonas reinhardtii; | XP_001700395, XP_001698887; |
| Cell surface protein | Chlamydomonas reinhardtii; | EDP03875, XP_001692397; |
| | Phaeodactylum tricornutum; | EEC44787, XP_002183604; |
| | Chlorella variabilis; | XP_005851371; |
| | Auxenochlorella protothecoides; | KFM28220, EFN59119; |
| | Coccomyxa subellipsoidea C-169; | XP_005652245; |
| | Bryopsis plumose; | BAI43481; |
| | Micromonas sp. RCC299; | ACO60738; |
| | Microcoleus vaginatus FGP-2; | EGK87709, EGK89095; |
| | Trichodesmium erythraeum IMS101; | YP_721603, YP_720732; |
| | Prochlorococcus marinus; | WP_011863058, WP_011376568; |
| | Synechococcus sp. WH 7805; | EAR19866, |
| | Synechocystis sp. PCC 6803; | BAA17432, P73456, NP_442714; |
| | Synechococcus elongatus PCC 7942; | ABB58124, ABB56302; |
| | Arthrospira platensis; | WP_006623132, WP_014273948, |
| | | WP_014275283, EKD10810; |
| | Arthrospira platensis NIES-39; | YP_005067833; |
| | Thermosynechococcus elongatus; | WP_011058259, WP_011056416; |
| | Thermosynechococcus elongatus BP-1; | NP_681159, BAC07773; |
| | Chlamydomonas reinhardtii; | EDO99169, AAW67003; |
| | Rhodopirellula baltica SWK14; | ELP31779; |
| | Phaeodactylum tricornutum; | EEC44786, EEC44540; |
| | Phaeodactylum tricornutum; | ACI65532, XP_002186062; |
| | Ostreococcus tauri; | XP_003083807, CEF97038; |
| | Auxenochlorella protothecoides; | KFM28329, KFM23052; |
| | Bathycoccus prasinos; | XP_007508599, CCO20216; |
| | Methanosarcina mazei Tuc01; | YP_007491104; |
| | Methanosarcina barkeri; | WP_011307725, AAZ71684; |
| | Mycoplasma bovis; | ADR25157 (polyamine ABC) |
| | Streptococcus salivarius; | AEJ52906 (polyamine); |
| | Planktothrix agardhii NIVA-CYA 126/8; | KEI65453 (polyamine ABC); |
| | Arthrospira sp. PCC 8005; | CDM95113 (polyamine ABC; |
| | Synechococcus sp. JA-2-3B′a(2-13); | ABD03026 (polyamine ABC); |
| | Spirulina subsalsa; | WP_033374023 (polyamine ABC) |
| | Aphanizomenon flos-aquae; | KHG40085 (polyamine ABC); |
| | Synechococcus sp. JA-3-3Ab; | ABD00934 (polyamine); |
| | Coleofasciculus chthonoplastes; | EDX75495 (polyamine ABC); |
| | Lyngbya sp. PCC 8106; | EAW39210 (polyamine); |
| | Aphanizomenon flos-aquae; | KHG39958 (polyamine ABC); |
| | Methanosarcina barkeri str. Fusaro; | YP_306783, YP_306264; |
| 108: | Rhodnius prolixus; | AAQ20830 (polylysine); |
| Positively charged | Trichomonas vaginalis G3; | XP_001301096 (polylysine); |
| polypeptide | Trichomonas vaginalis G3; | XP_001291750 (polylysine); |
| | Tobacco mosaic virus; | NP_597749; |
| 108: | Saccharomyces cerevisiae; | CAA39398, CAA54522; |
| Pyruvate Decarboxylase | Scheffersomyces stipites; | EAZ63682, EAZ63546; |
| | Kluyveromyces lactis, | CAA59953; |
| | Acetobacter pasteurianus; | AAM21208; |
| | Brettanomyces bruxellensis AWRI1499; | EIF49850; |
| | Lachancea kluyveri; | AAP75899, AAP75898; |
| | Rhodosporidium toruloides NP11; | EMS25670; |
| | Wickerhamomyces anomalus; | CAH56494; |
| | Pseudozyma brasiliensis GHG001; | EST04586; |
| | Kluyveromyces marxianus; | BAO41366; |
| | Ogataea parapolymorpha DL-1; | ESW98764; |
| | Pseudozyma hubeiensis SY62; | GAC99677; |
| | Histoplasma capsulatum G186AR; | EEH10009, EEH04743; |
| | Cyberlindnera jadinii; | BAI23188; |
| | Hanseniaspora uvarum; | AAA85103; |
| | Zymomonas mobilis; | AFN57569; |
| | Cyanobacterium aponinum PCC 10605; | AFZ53994; |
| | Microcystis aeruginosa; | GAL91844, WP_002787689; |
| | Synechococcus sp. WH 8016; | EHA63558; |
| | Crocosphaera watsonii WH 0401; | CCQ62787, WP_021836129; |
| | Crocosphaera watsonii; | WP_007303683, EAM53387; |
| | Auxenochlorella protothecoides; | KFM24239; |
| | Coccomyxa subellipsoidea C-169; | XP_005643654, EIE19110; |
| 109: | Candida boidinii; | CAA09466, O13437; |
| Formate dehydrogenase | Komagataella pastoris; | BAH57505; |
| | Methylophaga thiooxydans; | KGM07232, KGM07233; |
| | Methylophaga nitratireducenticrescens; | AFI83744, AFI83745; |
| | Mycobacterium vaccae; | BAB69476; |
| | Hyphomicrobium nitrativorans NL23; | AHB48368; |
| | Escherichia coli; | AAA23754; |
| | Vibrio tubiashii ATCC 19109; | AIW15822; |
| | Cedecea neteri; | AIR05429, KHE39131; |
| | Klebsiella pneumonia; | AIW99319, KHE25480; |
| | Pluralibacter gergoviae; | AIR00162; |
| | Enterobacter sp. R4-368; | YP_008107767; |
| | Citrobacter braakii; | KHE12739, KHE08171; |
| | Citrobacter freundii; | KGY88354; |
| | Enterobacter cloacae; | KGY63138; |
| | Prochlorococcus sp. scB245a_518D8; | WP_025936369; |
| | Mastigocoleus testarum; | WP_027846123; |
| | Cyanothece sp. PCC 8802; | WP_015783314; |
| | Nostoc punctiforme; | WP_012407412; |
| | Trichodesmium erythraeum; | WP_011610267; |
| | Thermodesulfatator indicus; | AEH45674, AEH46025; |
| | Bacillus subtilis; | KFC29810; |
| | Sulfobacillus acidophilus DSM 10332; | AEW04854; |
| | Syntrophothermus lipocalidus; | ADI02197; |
| | Hydrogenobacter thermophilus TK-6; | BAI69388, YP_003432590; |
| 110: | Sulfobacillus acidophilus DSM 10332; | AEW04442, YP_005256114; |
| Formaldehyde | Geobacillus thermoglucosidans; | EID43710; |
| dehydrogenase | Geobacillus sp. GHH01; | AGE20787; |
| | Rhodopirellula baltica SH 1; | NP_864907; |
| | Arthrobacter chlorophenolicus A6; | YP_002489735, YP_002487096; |
| | Burkholderia multivorans; | YP_001583515; |
| | Granulicella mallensis MP5ACTX8; | YP_005060061; |
| | Arthrobacter sp. PAMC25486; | AIY02235; |
| | Pseudomonas putida; | AHZ74859, YP_004701746; |
| | Rhodospirillum rubrum ATCC 11170; | YP_428486; |
| | Bacillus sp. BSC154; | KFI04000; |
| | Bacillus subtilis BEST7613; | BAM50883; |
| | Hyphomicrobium zavarzinii; | CAC85637; |
| | Halopiger xanaduensis SH-6; | YP_004595370, AEH35491; |
| | Thalassotalea sp. ND16A; | KGK00333; |
| | Brevibacillus brevis; | AEM59539; |
| | Pseudomonas putida; | BAA04743, YP_007227278; |
| | Halalkalicoccus jeotgali B3; | YP_003736860, ADJ15068; |
| | Pseudomonas sp. UW4; | AFY22196; |
| | Candidatus Halobonum tyrrellensis; | ESP87727; |
| | Pseudomonas plecoglossicida NB2011; | EPB95789; |
| | Halococcus thailandensis JCM 13552; | EMA53947; |
| | Halococcus salifodinae DSM 8989; | EMA52447; |
| | Halococcus saccharolyticus DSM 5350; | EMA44468; |
| | Haloarcula japonica DSM 6131; | EMA27812; |
| | Haloferax denitrificans ATCC 35960; | EMA06490; |
| | Haloferax sulfurifontis ATCC BAA-897; | ELZ96420; |
| | Haloferax alexandrinus JCM 10717; | ELZ95747; |
| | Natrialba aegyptia DSM 13077; | ELZ03549; |
| | Burkholderia sp. SJ98; | EKS67251; |
| | Burkholderia terrae BS001; | EIM95920; |
| | Pseudomonas fluorescens A506; | YP_006326331; |
| | Haloquadratum walsbyi C23; | YP_005841059; |
| | Natrialba taiwanensis; | WP_006824465; |
| | Escherichia coli; | BAA22412; |
| | Synechocystis sp. PCC 6803; | NP_440484; |
| | Synechococcus elongatus PCC 7942; | ABB56491; |
| | Arthrospira platensis; | YP_005071621; |
| | Amycolatopsis methanolica 239; | AIJ21411; |
| | Mycobacterium marinum MB2; | EPQ77120; |
| 111: | Escherichia coli; | P02981; |
| Tetracycline resistance | Cloning vector pRK7813; | AGF38340; |
| protein (tetA) | Cloning vector pKS800; | BAJ06605; |
| | Klebsiella pneumonia; | YP_008997867, AHF45941; |
| | Corynebacterium glutamicum; | NP_052571, AAD25063; |
| | Thermococcus gammatolerans EJ3; | YP_002958733, YP_002959779; |
| | Streptomyces coelicolor A3(2); | CAC14348, NP_625085; |
| | Streptococcus pneumoniae Taiwan; | ACO23503; |
| | Vibrio cholerae O1 biovar El Tor; | BAG66128; |
| | Burkholderia glumae PG1; | AJK48844; |
| | Rhizobium etli bv. phaseoli str. IE4803; | AJC80365; |
| 112: | Campylobacter jejuni; | CAD35325; |
| Kanamycin resistance protein | Cloning vector pIMK; | CAP74563; |
| (Kan^{r}) | yfp marker plasmid pWM1011; | AAG34047; |
| | cfp marker plasmid pWM1009; | AAG34043; |
| | synthetic construct; | CAA05684; |
| | cfp marker plasmid pWM1012; | AAG34051; |
| | Cloning vector pNIGEL19; | ACO48265; |
| 113: | Bacillus cereus; | WP_016513111, EOP95255; |
| Gentamicin resistance | Cloning vector pCR2.1-gentR; | ABS71237; |
| protein | Cloning vector pTH1522; | ABC47322; |
| | Cloning vector pJC8; | AGA63621; |
| | Plasmid R; | AAA19915; |
| | Enterococcus gallinarum; | AAB49832; |
| | Transposon delivery vector pZXL5; | AFD97621; |
| | Bacillus thuringiensis Bt407; | YP_006926052; |
| | Baculovirus expression vector | AAT09789; |
| | pFastBac1-HM; | |
| 114: | Streptomyces netropsis | AAB66654; |
| Spectinomycin resistance | Streptomyces spectabilis; | AAF63341; |
| protein (Spcr) | Staphylococcus aureus; | KII21062; |
| | Cloning vector pCDF-J23100-TetO- | AIO11020; |
| | lacI-LVA; synthetic vector pCDF-MCS; | AIS22788; |
| | Delivery vector pDGIEF; | ABC88414; |
| | Delivery vector pIEF16S; | ABC88419; |
| | Listeria innocua; | YP_008119852, AGN12845; |
| | Micromonospora sp. ATCC 39149; | EEP72249; |
| | Binary vector pOSCAR; | ADR73032; |
| | Suicide vector pMRKO1; | ADV78249; |
| | Transposon delivery vector pAW068; | ABV70028; |
| | Shuttle vector pMTL83353; | ACR43899; |
| | Cloning vector pFW_GFP; | AAC53685; |
| 114: | Streptococcus agalactiae; | AIK76614, AIK74539; |
| Streptomycin resistance | Klebsiella pneumonia; | YP_007349701, AIK72509; |
| protein (aadA) | Integration vector pZR606; | AHZ10952; |
| | Escherichia coli | AAO49597, ADH82152; |
| | Cloning vector pBAMD1-4;; | AIX94015; |
| | Streptococcus dysgalactiae; | BAM60369; |
| | Salmonella enterica; | BAK19730; |
| | Staphylococcus rostri; | CBA13544; |
| | Agrobacterium sp. H13-3; | ADY64157; |
| | Expression vector pBS437V; | AAP45701; |
| | Cloning vector pBS152v; | AAG09291; |
| 115: | Escherichia coli; | YP_006952162, YP_006952158; |
| Ampicillin resistance protein | Pseudoalteromonas haloplanktis; | EGI75151; |
| (amp^{r}) | Bacillus weihenstephanensis; | AIW88365; |
| | Bacillus subtilis MB73/2; | EME04863; |
| | Cloning vector pUG7; | AAG34548; |
| | Expression vector pTip-CH2; | BAD11229; |
| | PCR template vector pUG6; | AAG34544; |
| | Cloning vector pCAT-Mgen-recA; | AFM47375; |
| | Recombinase expression vector pSH47; | AAG34516; |
| | Baculovirus expression vector pRADM; | AEY64193; |
| | Shuttle vector pNR-46121; | AIL56504 |
| | synthetic vector pET-T7p(-12T)- | AIS22810; |
| | SpacerA-GFP-LVA; | |
| 116: | Corynebacterium glutamicum; | NP_044444, AAB46601; |
| Chloramphenicol resistance | Cloning vector pDEST414CYC1t7; | AGL80176; |
| protein (CmR) | Cloning vector pIPKTA30N; | ABQ65200; |
| | Cloning vector GWluc-basic; | ABO76903; |
| | Pantoea ananatis LMG 20103; | ADD75805; |
| | Yeast expression vector pJG518; | AAX94717; |
| | Binary vector pEAQ-HT-DEST3; | ACV49954; |
| | Binary vector pIPKb009; | ABW70109; |
| | expression vector pUCDMIG | AEY64192; |
| | Plant transient expression vector; | AFX83551, |
| 117: | Klebsiella pneumonia; | YP_007349547, CCN79980; |
| Hygromycin resistance | Cloning vector pMQ351 | ADQ43406; |
| protein (hph) | Cloning vector pNIGEL17; | ACO48271; |
| | Salmonella enterica; | AIT72690; |
| | Cloning vector pMQ300; | ADK63421; |
| | BiFC vector pCHGC155; | AGH62558; |
| 118: | Agrobacterium sp. CP4; | Q9R4E4 (CP4 EPSP synthase); |
| Glyphosate resistance protein | synthetic construct; | AII80555, AEM75108 (CP4); |
| (epsps; or, glyphosate acetyl | Escherichia coli K-12; | P0A6D3 (epsps); |
| transferase (Gat)) | Amaranthus tuberculatus; | ACV67278, ACV67277 (epsps); |
| | Amaranthus palmeri; | ACV53022, ACV53021(epsps); |
| | Gluconobacter frateurii NBRC 103465; | GAD08994; |
| | Pseudomonas sp. PG2982; | P18896; |
| | Cloning vector pAM3G; | ADO63834; |
| | Vector mini-Tn7-gat; | ACX31712; |
| | Cloning vector pwFRT-GSr; | ACJ70055; |
| | Cloning vector pFlp-AB7; | ACJ70061; |
| 119: | Thermosynechococcus elongatus BP-1; | NP_681156, BAC07918; |
| Argininosuccinate lyase | Arthrospira platensis; | YP_005067487, BAI88949; |
| (arg7) | Spirulina subsalsa; | WP_017306995; |
| | Arthrospira maxima CS-328; | EDZ94142; |
| | Synechocystis sp. PCC 6803; | NP_440604, WP_010871913; |
| | Synechococcus elongatus PCC 7942; | ABB58505; |
| | Synechococcus sp. PCC 7002; | ACB00465; |
| | Nostoc sp. PCC 7107; | YP_007051699; |
| | Cyanobacterium aponinum; | AFZ52419; |
| | Anabaena cylindrica PCC 7122; | AFZ58080; |
| | Synechococcus sp. WH 8016; | EHA59113; |
| | Prochlorococcus marinus; | WP_032525717, WP_032523803; |
| | Chlamydomonas reinhardtii | CAA34615, CAA09001; |
| | Chlorella variabilis | EFN52305, XP_005844407; |
| | Auxenochlorella protothecoides; | KFM28402; |
| | Bathycoccus prasinos; | XP_007510956; |
| | Shewanella algae; | WP_025011590; |
| | Emiliania huxleyi CCMP1516 | EOD30692, XP_005783121; |
| | Thalassiosira pseudonana CCMP1335 | EED90549; |
| | Ralstonia eutropha H16; | CAJ94001, Q0K7M0; |
| | Ralstonia eutropha JMP134; | AAZ63178, AAZ60077; |
| | Zymomonas mobilis | WP_023593629, WP_015740233; |
| | Syntrophothermus lipocalidus; | ADI02913; |
| | Hippea maritima DSM 10411; | AEA33832; |
| | Sulfobacillus acidophilus DSM 10332; | AEW04357; |
| | Thermovirga lienii DSM 17291; | AER66275; |
| | Thermodesulfatator indicus; | AEH45167; |
| | Geobacillus thermoleovorans; | AEV20403; |
| | Caldicellulosiruptor kristjanssonii; | ADQ40738; |
| | Thermus sp. CCB_US3_UF1; | AEV17054; |
| | Caldicellulosiruptor hydrothermalis; | ADQ07194; |
| | Melioribacter roseus P3M-2; | AFN74157; |
| | Caldicellulosiruptor saccharolyticus; | ABP67398; |
| | Bacillus methanolicus MGA3; | AIE61023; |
| | Spirochaeta thermophila; | ADN02278; |
| | Hydrogenobacter thermophilus TK-6; | YP_003433478, BAI70277; |
| | Thermotoga petrophila RKU-1; | YP_001244661; |
| | Geobacillus sp. JF8; | AGT33097; |
| | Bacillus subtilis; | KFC31226; |
| | Bacillus coagulans 2-6; | AEH53530; |
| | Anoxybacillus sp. BCO1; | KHF26873; |
| | Thermus sp. CCB_US3_UF1; | AEV16454; |
| | Thermoanaerobacter sp. YS13; | KHO61828; |
| | Methanothermobacter marburgensis; | WP_013295538, ADL58314; |
| | Methanothermobacter | BAM69481, |
| | thermautotrophicus; | AAB84775; |
| | Methanocella conradii HZ254; | YP_005379810, AFC99291; |
| | Methanoregula formicica SMSP; | AGB03410; |
| | Methanococcus maripaludis S2; | NP_987133; |
| | Methanococcoides methylutens; | KGK97821; |
| | Methanococcus maripaludis OS7; | BAP62099; |
| | Methanococcus maripaludis KA1; | BAP60130; |
| | Methanococcus maripaludis S2; | CAF29569; |
| | Bacillus methanolicus MGA3; | EIJ84201, EIJ79262; |
| | Candida maltosa Xu316; | EMG47575; |
| | Clostridium pasteurianum NRRL B-598; | ETD70657; |
| | Nostoc sp. PCC 7120 (Anabaena sp. | NP_487927, BAB75586, |
| | PCC 7120); | WP_010998028; |
| 120: | Thermosynechococcus elongatus BP-1; | NP_682145, BAC08907; |
| Nitrate reductase | Synechocystis sp. PCC 6803; | AGF51177, BAA17488; |
| | Synechococcus elongatus PCC 7942; | CAA52675; |
| | Arthrospira platensis; | YP_005067893, BAI89355; |
| | Arthrospira platensis str. Paraca; | KDR58325; |
| | Arthrospira sp. PCC 8005; | CDM94135, CCE18678; |
| | Cyanothece sp. ATCC 51142; | ACB50564; |
| | Cyanothece sp. PCC 8801; | AAO25121; |
| | Stanieria cyanosphaera PCC 7437; | AFZ35100; |
| | Synechococcus sp. CC9311; | ABI46326, ABI46326; |
| | Synechococcus sp. JA-2-3B′a(2-13); | ABD01041; |
| | Synechococcus sp. PCC 7002; | ACA99311; |
| | Nostoc sp. PCC 7120; | NP_484656, BAB72570; |
| | Cyanobium sp. CACIAM 14; | KEF41492; |
| | Dolichospermum circinale; | WP_028090041; |
| | Aphanizomenon flos-aquae; | WP_027400668; |
| | Planktothrix prolifica; | WP_026796600; |
| | Pseudanabaena sp. PCC 6802; | WP_026102963; |
| | Anabaena sp. 90; | AFW96426; |
| | Cyanothece sp. ATCC 51142; | ACB50564; |
| | Prochlorococcus marinus; | WP_032520378; |
| | Prochlorococcus sp. scB241_528J8; | WP_025926746; |
| | Chlamydomonas reinhardtii; | EDP00805, XP_001696697; |
| | Shewanella algae; | WP_025008973; |
| | Chlorella vulgaris; | ACF22999, ABP97095; |
| | Pseudochlorella pringsheimii; | AAP32278; |
| | Dunaliella salina; | AGC97428, AAP75705; |
| | Volvox carteri; | AAA11144; |
| | Dunaliella viridis; | AAT72293, ABJ91208; |
| | Coccomyxa subellipsoidea C-169; | XP_005646409, EIE21865; |
| | Gracilaria tenuistipitata; | ACX31653, ACX31652; |
| | Heterosigma akashiwo; | ACS44801; |
| | Nannochloropsis sp. W2J3B; | AET85052; |
| | Bathycoccus prasinos; | XP_007514576; |
| | Phaeodactylum tricornutum; | AAV66996; |
| | Cyanidioschyzon merolae strain 10D; | XP_005535839; |
| | Thalassiosira oceanica; | EJK46860; |
| | Ralstonia eutropha H16; | CAA50508; |
| | Burkholderia sp. K24; | KFX64654; |
| | Bacillus thuringiensis serovar; | EXL37784; |
| | Methylomonas denitrificans; | KHD30476; |
| | Marinithermus hydrothermalis; | AEB12539; |
| | Bacillus subtilis; | KFC29867; |
| | Geobacillus sp. JF8; | AGT32146, AGT31099; |
| | Thermodesulfatator indicus; | AEH45676; |
| | Caldicellulosiruptor hydrothermalis; | ADQ07227; |
| | Thermovirga lienii DSM 17291; | AER66908; |
| | Caldicellulosiruptor kronotskyensis; | ADQ46341; |
| | Desulfovibrio vulgaris str. ‘Miyazaki F’; | ACL08432; |
| | Desulfovibrio sp. FW1012B; | EHJ47733; |
| | Thiorhodococcus drewsii AZ1; | EGV31372; |
| | Thiocapsa marina 5811; | EGV16886; |
| | Hyphomicrobium nitrativorans NL23; | AHB47344; |
| | Ogataea angusta; | CAA11232; |
| | Rhodotorula glutinis ATCC 204091; | EGU11696; |
| | Wickerhamomyces anomalus; | AAF28059; |
| | Blastobotrys adeninivorans; | CAQ77148; |
| | Ogataea angusta; | CAA88925; |

### Designer Calvin-Cycle-Channeled 1-Butanol Producing Pathways

[0178] According to one of the various embodiments, a designer Calvin-cycle-channeled pathway is created that takes the Calvin-cycle intermediate product, 3-phosphoglycerate, and converts it into 1-butanol by using, for example, a set of enzymes consisting of (as shown with the numerical labels 34, 35, 03-05, 36-43 in FIG. 4): NADPH-dependent glyceraldehyde-3-phosphate dehydrogenase 34, NAD-dependent glyceraldehyde-3-phosphate dehydrogenase 35, phosphoglycerate mutase 03, enolase 04, pyruvate kinase 05, citramalate synthase 36, 2-methylmalate dehydratase 37, 3-isopropylmalate dehydratase 38, 3-isopropylmalate dehydrogenase 39, 2-isopropylmalate synthase 40, isopropylmalate isomerase 41, 2-keto acid decarboxylase 42, and alcohol dehydrogenase (NAD dependent) 43. In this pathway design, as mentioned above, the NADPH-dependent glyceraldehyde-3-phosphate dehydrogenase 34 and NAD-dependent glyceraldehyde-3-phosphate dehydrogenase 35 serve as a NADPH/NADH conversion mechanism that can covert certain amount of photosynthetically generated NADPH to NADH which can be used by the NADH-requiring alcohol dehydrogenase 43 (examples of its encoding gene with the following GenBank accession numbers: BAB59540, CAA89136, NP_{—}148480) for production of 1-butanol by reduction of butyraldehyde.

[0179] According to one of the various embodiments, it is a preferred practice to also use an NADPH-dependent alcohol dehydrogenase 44 that can use NADPH as the source of reductant so that it can help alleviate the requirement of NADH supply for enhanced photobiological production of butanol and other alcohols. As listed in Table 1, examples of NADPH-dependent alcohol dehydrogenase 44 include (but not limited to) the enzyme with any of the following GenBank accession numbers: YP_{—}001211038, ZP_{—}04573952, XP_{—}002494014, CAY71835, NP_{—}417484, EFC99049, and ZP_{—}02948287.

[0180] Note, the 2-keto acid decarboxylase 42 (e.g., AAS49166, ADA65057, CAG34226, AAA35267, CAA59953, A0QBE6, A0PL16) and alcohol dehydrogenase 43 (and/or 44) have quite broad substrate specificity. Consequently, their use can result in production of not only 1-butanol but also other alcohols such as propanol depending on the genetic and metabolic background of the host photosynthetic organisms. This is because all 2-keto acids can be converted to alcohols by the 2-keto acid decarboxylase 42 and alcohol dehydrogenase 43 (and/or 44) owning to their broad substrate specificity. Therefore, according to another embodiment, it is a preferred practice to use a substrate-specific enzyme such as butanol dehydrogenase 12 when/if production of 1-butanol is desirable. As listed in Table 1, examples of butanol dehydrogenase 12 are NADH-dependent butanol dehydrogenase (e.g., GenBank: YP_{—}148778, NP_{—}561774, AAG23613, ZP_{—}05082669, ADO12118) and/or NAD(P)H-dependent butanol dehydrogenase (e.g., NP_{—}562172, AAA83520, EFB77036, EFF67629, ZP_{—}06597730, EFE12215, EFC98086, ZP_{—}05979561).

[0181] In one of the various embodiments, another designer Calvin-cycle-channeled 1-butanol production pathway is created that takes the Calvin-cycle intermediate product, 3-phosphoglycerate, and converts it into 1-butanol by using, for example, a set of enzymes consisting of (as shown with the numerical labels 34, 35, 03, 04, 45-52 and 40-43 (44/12) in FIG. 4): NADPH-dependent glyceraldehyde-3-phosphate dehydrogenase 34, NAD-dependent glyceraldehyde-3-phosphate dehydrogenase 35, phosphoglycerate mutase 03, enolase 04, phosphoenolpyruvate carboxylase 45, aspartate aminotransferase 46, aspartokinase 47, aspartate-semialdehyde dehydrogenase 48, homoserine dehydrogenase 49, homoserine kinase 50, threonine synthase 51, threonine ammonia-lyase 52, 2-isopropylmalate synthase 40, isopropylmalate isomerase 41, 3-isopropylmalate dehydrogenase 39, 2-keto acid decarboxylase 42, and NAD-dependent alcohol dehydrogenase 43 (and/or NADPH-dependent alcohol dehydrogenase 44, or butanol dehydrogenase 12).

[0182] According to another embodiment, the amino-acids-metabolism-related 1-butanol production pathways [numerical labels 03-05, 36-43; and/or 03, 04, 45-52 and 39-43 (44/12)] can operate in combination and/or in parallel with other photobiological butanol production pathways. For example, as shown also in FIG. 4, the Frctose-6-photophate-branched 1-butanol production pathway (numerical labels 13-32 and 44/12) can operate with the parts of amino-acids-metabolism-related pathways [numerical labels 36-42, and/or 45-52 and 40-42) with pyruvate and/or phosphoenolpyruvate as their joining points.

[0183] Examples of designer Calvin-cycle-channeled 1-butanol production pathway genes (DNA constructs) are shown in the DNA sequence listings. SEQ ID NOS: 58-70 represent a set of designer genes for a designer nirA-promoter-controlled Calvin-cycle-channeled 1-butanol production pathway (as shown with numerical labels 34, 35, 03-05, and 36-43 in FIG. 4) in a host oxyphotobacterium such as Thermosynechococcus elongatus BP1. Briefly, SEQ ID NO: 58 presents example 58 of a designer nirA-promoter-controlled NADPH-dependent Glyceraldehyde-3-Phosphate Dehydrogenase (34) DNA construct (1417 bp) that comprises: a PCR FD primer (sequence 1-20), a 231-bp nirA promoter from Thermosynechococcus elongatus BP1 (21-251), an enzyme-encoding sequence (252-1277) selected/modified from the sequences of a Staphylococcus aureus 04-02981 NADPH-dependent glyceraldehyde-3-phosphate dehydrogenase (GenBank: ADC37857), a 120-bp rbcS terminator from BP1 (1278-1397), and a PCR RE primer (1398-1417) at the 3′ end.

[0184] SEQ ID NO: 59 presents example 59 of a designer nirA-promoter-controlled NAD-dependent glyceraldehyde-3-phosphate dehydrogenase (35) DNA construct (1387 bp) that comprises: a PCR FD primer (sequence 1-20), a 231-bp nirA promoter from Thermosynechococcus elongatus BP1 (21-251), an enzyme-encoding sequence (252-1247) selected/modified from the sequences of an Edwardsiella tarda FL6-60 NAD-dependent glyceraldehyde-3-phosphate dehydrogenase (GenBank: ADM41489), a 120-bp rbcS terminator from BP1 (1248-1367), and a PCR RE primer (1368-1387) at the 3′ end.

[0185] SEQ ID NO: 60 presents example 60 of a designer nirA-promoter-controlled Phosphoglycerate Mutase (03) DNA construct (1627 bp) that includes a PCR FD primer (sequence 1-20), a 231-bp nirA promoter from Thermosynechococcus elongatus BP1 (21-251), an enzyme-encoding sequence (252-1487) selected/modified from the sequences of a Oceanithermus profundus DSM 14977 phosphoglycerate mutase (GenBank: ADR35708), a 120-bp rbcS terminator from BP1 (1488-1607), and a PCR RE primer (1608-1627).

[0186] SEQ ID NO: 61 presents example 61 of a designer nirA-promoter-controlled Enolase (04) DNA construct (1678 bp) that includes a PCR FD primer (sequence 1-20), a 231-bp nirA promoter from Thermosynechococcus elongatus BP1 (21-251), an enzyme-encoding sequence (252-1538) selected from the sequences of a Syntrophothermus Enolase (GenBank: ADIO2602), a 120-bp rbcS terminator from BP1 (1539-1658), and a PCR RE primer (1659-1678).

[0187] SEQ ID NO: 62 presents example 62 of a designer nirA-promoter-controlled Pyruvate Kinase (05) DNA construct (2137 bp) that includes a PCR FD primer (sequence 1-20), a 231-bp nirA promoter from Thermosynechococcus elongatus BP1 (21-251), an enzyme-encoding sequence (252-1997) selected from the sequences of a Syntrophothermus lipocalidus pyruvate kinase (GenBank: ADIO2459), a 120-bp rbcS terminator from BP1 (1998-2117), and a PCR RE primer (2118-2137).

[0188] SEQ ID NO: 63 presents example 63 of a designer nirA-promoter-controlled Citramalate Synthase (36) DNA construct (2163 bp) that includes a PCR FD primer (sequence 1-20), a 305-bp nirA promoter (21-325), an enzyme-encoding sequence (326-1909) selected and modified from Hydrogenobacter thermophilus TK-6 citramalate synthase (YP_{—}003433013), a 234-bp rbcS terminator from BP1 (1910-2143), and a PCR RE primer (2144-2163).

[0189] SEQ ID NO: 64 presents example 64 of a designer nirA-promoter-controlled 3-Isopropylmalate/(R)-2-Methylmalate Dehydratase (37) DNA construct (2878 bp) consisting of a PCR FD primer (sequence 1-20), a 231-bp nirA promoter from Thermosynechococcus elongatus BP1 (21-251), a 3-isopropylmalate/(R)-2-methylmalate dehydratase large subunit-encoding sequence (252-2012) selected/modified from the sequences of an Eubacterium 3-isopropylmalate/(R)-2-methylmalate dehydratase large subunit (YP_{—}002930810), a 231-bp nirA promoter from Thermosynechococcus (2013-2243), a 3-isopropylmalate/(R)-2-methylmalate dehydratase small subunit-encoding sequence (2244-2738) selected/modified from the sequences of an Eubacterium 3-isopropylmalate/(R)-2-methylmalate dehydratase small subunit (YP_{—}002930809), a 120-bp rbcS terminator from BP1 (2739-2858), and a PCR RE primer (2859-2878).

[0190] SEQ ID NO: 65 presents example 65 of a designer nirA-promoter-controlled 3-Isopropylmalate Dehydratase (38) DNA construct (2380 bp) comprises: a PCR FD primer (sequence 1-20), a 231-bp nirA promoter from Thermosynechococcus elongatus BP1 (21-251), a 3-isopropylmalate dehydratase large subunit-encoding sequence (252-1508) selected/modified from the sequences of a Thermotoga petrophila 3-isopropylmalate dehydratase large subunit (ABQ46641), a 231-bp nirA promoter from Thermosynechococcus elongatus BP1 (1509-1739), a 3-isopropylmalate dehydratase small subunit-encoding sequence (1740-2240) selected/modified from the sequences of a Thermotoga 3-isopropylmalate dehydratase small subunit (ABQ46640), a 120-bp rbcS terminator from BP1 (2241-2360), and a PCR RE primer (2361-2380).

[0191] SEQ ID NO: 66 presents example 66 of a designer nirA-promoter-controlled 3-Isopropylmalate Dehydrogenase (39) DNA construct (1456 bp) consisting of: a PCR FD primer (1-20), a 231-bp nirA promoter from Thermosynechococcus elongatus BP1 (21-251), a 3-isopropylmalate dehydrogenase-encoding sequence (252-1316) selected from the sequences of a Thermotoga 3-isopropylmalate dehydrogenase (GenBank: CP000702 Region 349983 . . . 351047), a 120-bp rbcS terminator from BP1 (1317-1436), and a PCR RE primer (1437-1456).

[0192] SEQ ID NO: 67 presents example 67 of a designer nirA-promoter-controlled 2-Isopropylmalate Synthase (40, EC 4.1.3.12) DNA construct (1933 bp) consisting of: a PCR FD primer (sequence 1-20), a 231-bp nirA promoter from Thermosynechococcus elongatus (21-251), an enzyme-encoding sequence (252-1793) selected/modified from the sequences of a Thermotoga petrophila 3-isopropylmalate dehydrogenase (CP000702 Region: 352811 . . . 354352), a 120-bp rbcS terminator from BP1 (1794-1913), and a PCR RE primer (1914-1933).

[0193] SEQ ID NO: 68 presents example 68 of a designer nirA-promoter-controlled Isopropylmalate Isomerase (41) DNA construct (2632 bp) comprises: a PCR FD primer (sequence 1-20), a 231-bp nirA promoter from Thermosynechococcus elongatus BP1 (21-251), a isopropylmalate isomerase large subunit-encoding sequence (252-1667) selected/modified from the sequences of a Geobacillus kaustophilus 3-isopropylmalate isomerase large subunit (YP_{—}148509), a 231-bp nirA promoter from Thermosynechococcus (1668-1898), a isopropylmalate isomerase small subunit-encoding sequence (1899-2492) selected from the sequences of a Geobacillus kaustophilus isopropylmalate isomerase small subunit (YP_{—}148508), a 120-bp rbcS terminator from BP1 (2493-2612), and a PCR RE primer (2613-2632).

[0194] SEQ ID NO: 69 presents example 69 of a designer nirA-promoter-controlled 2-Keto Acid Decarboxylase (42) DNA construct (2035 bp) consisting of: a PCR FD primer (sequence 1-20), a 231-bp nirA promoter from Thermosynechococcus elongatus BP1 (21-251), a 2-keto acid decarboxylase-encoding sequence (252-1895) selected/modified from the sequences of a Lactococcus lactis branched-chain alpha-ketoacid decarboxylase (AAS49166), a 120-bp rbcS terminator from BP1 (1896-2015), and a PCR RE primer (2016-2035) at the 3′ end.

[0195] SEQ ID NO: 70 presents example 70 of a designer nirA-promoter-controlled NAD-dependent Alcohol Dehydrogenase (43) DNA construct (1426 bp) consisting of: a PCR FD primer (sequence 1-20), a 231-bp nirA promoter from Thermosynechococcus elongatus BP1 (21-251), an enzyme-encoding sequence (252-1286) selected/modified from the sequences of an Aeropyrum pernix K1 NAD-dependent alcohol dehydrogenase (NP_{—}148480), a 120-bp rbcS terminator from BP1 (1287-1406), and a PCR RE primer (1407-1426).

[0196] As mentioned before, use of an NADPH-dependent alcohol dehydrogenase 44 that can use NADPH as the source of reductant can help alleviate the requirement of NADH supply for enhanced photobiological production of butanol and other alcohols. SEQ ID NO: 71 presents example 71 of a designer nirA-promoter-controlled NADPH-dependent Alcohol Dehydrogenase (44) DNA construct (1468 bp) that comprises: a PCR FD primer (sequence 1-20), a 231-bp nirA promoter from Thermosynechococcus elongatus BP1 (21-251), an enzyme-encoding sequence (252-1328) selected from the sequences of a Pichia pastoris NADPH-dependent medium chain alcohol dehydrogenase with broad substrate specificity (XP_{—}002494014), a 120-bp rbcS terminator from BP1 (1329-1458), and a PCR RE primer (1459-1468) at the 3′ end. In one of the examples, this type of NADPH-dependent alcohol dehydrogenase gene (SEQ ID NO: 71) is also used in construction of Calvin-cycle-channeled butanol production pathway.

[0197] However, because of the broad substrate specificity of the 2-keto acid decarboxylase (42, SEQ ID NO: 69) and the alcohol dehydrogenase (43, SEQ ID NO: 70; or 44, SEQ ID NO: 71), the pathway expressed with designer genes of SEQ ID NO: 69 and SEQ ID NO: 71 (and/or SEQ ID NO: 70) can result in the production of alcohol mixtures rather than single alcohols since all 2-keto acids can be converted to alcohols by the two broad substrate specificity enzymes. Therefore, to improve the specificity for 1-butanol production, it is a preferred practice to use a more substrate-specific butanol dehydrogenase 12. SEQ ID NO: 72 presents example 72 of a designer nirA-promoter-controlled NADH-dependent Butanol Dehydrogenase (12a) DNA construct (1555 bp) that includes a PCR FD primer (sequence 1-20), a 231-bp nirA promoter from Thermosynechococcus elongatus BP1 (21-251), an enzyme-encoding sequence (252-1415) selected/modified from the sequences of a Geobacillus kaustophilus NADH-dependent butanol dehydrogenase (YP_{—}148778), a 120-bp rbcS terminator from BP1 (1416-1535), and a PCR RE primer (1536-1555) at the 3′ end.

[0198] SEQ ID NO: 73 presents example 73 of a designer nirA-promoter-controlled NADPH-dependent Butanol Dehydrogenase (12b) DNA construct (1558 bp) consisting of a PCR FD primer (sequence 1-20), a 231-bp nirA promoter from Thermosynechococcus elongatus BP1 (21-251), a NADPH-dependent butanol dehydrogenase-encoding sequence (252-1418) selected/modified from the sequences of a Clostridium perfringens NADPH-dependent butanol dehydrogenase (NP_{—}562172), a 120-bp rbcS terminator from BP1 (1419-1528), and a PCR RE primer (1529-1558) at the 3′ end.

[0199] Use of SEQ ID NOS: 72 and/or 73 (12a and/or 12b) along with SEQ ID NOS: 58-69 represents a specific Calvin-cycle-channeled 1-butanol production pathway numerically labeled as 34, 35, 03-05, 36-42 and 12 in FIG. 4.

[0200] SEQ ID NOS: 74-81 represent an alternative (amino acids metabolism-related) pathway (45-52 in FIG. 4) that branches from the point of phosphoenolpyruvate and merges at the point of 2-ketobutyrate in the Calvin-cycle-channeled 1-butanol production pathway. Briefly, SEQ ID NO: 74 presents example 74 of a designer nirA-promoter-controlled Phosphoenolpyruvate Carboxylase (45) DNA construct (3646 bp) consisting of: a PCR FD primer (sequence 1-20), a 231-bp nirA promoter from Thermosynechococcus elongatus BP1 (21-251), an enzyme-encoding sequence (252-3506) selected/modified from the sequences of a Thermaerobacter subterraneus DSM 13965 Phosphoenolpyruvate carboxylase (EFR61439), a 120-bp rbcS terminator from BP1 (3507-3626), and a PCR RE primer (3627-3646) at the 3′ end.

[0201] SEQ ID NO: 75 presents example 75 of a designer nirA-promoter-controlled Aspartate Aminotransferase (46) DNA construct (1591 bp) that includes a PCR FD primer (sequence 1-20), a 231-bp nirA promoter from Thermosynechococcus elongatus BP1 (21-251), an enzyme-encoding sequence (252-1451) selected/modified from the sequences of a Thermotoga lettingae aspartate aminotransferase (YP_{—}001470126), a 120-bp rbcS terminator from BP1 (1452-1471), and a PCR RE primer (1472-1591).

[0202] SEQ ID NO: 76 presents example 76 of a designer nirA-promoter-controlled Aspartate Kinase (47) DNA construct (1588 bp) that includes a PCR FD primer (sequence 1-20), a 231-bp nirA promoter from Thermosynechococcus elongatus BP1 (21-251), an enzyme-encoding sequence (252-1448) selected/modified from the sequences of a Thermotoga lettingae TMO aspartate kinase (YP_{—}001470361), a 120-bp rbcS terminator from BP1 (1449-1568), and a PCR RE primer (1569-1588).

[0203] SEQ ID NO: 77 presents example 77 of a designer nirA-promoter-controlled Aspartate-Semialdehyde Dehydrogenase (48) DNA construct (1411 bp) that includes a PCR FD primer (sequence 1-20), a 231-bp nirA promoter from Thermosynechococcus elongatus BP1 (21-251), an enzyme-encoding sequence (252-1271) selected/modified from the sequences of a Thermotoga lettingae TMO aspartate-semialdehyde dehydrogenase (YP_{—}001470981), a 120-bp rbcS terminator from BP1 (1272-1391), and a PCR RE primer (1392-1411) at the 3′ end.

[0204] SEQ ID NO: 78 presents example 78 of a designer nirA-promoter-controlled Homoserine Dehydrogenase (49) DNA construct (1684 bp) that includes a PCR FD primer (sequence 1-20), a 231-bp nirA promoter from Thermosynechococcus elongatus BP1 (21-251), an enzyme-encoding sequence (252-1544) selected/modified from the sequences of a Syntrophothermus lipocalidus DSM 12680 homoserine dehydrogenase (ADIO2231), a 120-bp rbcS terminator from BP1 (1545-1664), and a PCR RE primer (1665-1684) at the 3′ end.

[0205] SEQ ID NO: 79 presents example 79 of a designer nirA-promoter-controlled Homoserine Kinase (50) DNA construct (1237 bp) that includes a PCR FD primer (sequence 1-20), a 231-bp nirA promoter from Thermosynechococcus elongatus BP1 (21-251), an enzyme-encoding sequence (252-1097) selected/modified from the sequences of a Thermotoga petrophila RKU-1 Homoserine Kinase (YP_{—}001243979), a 120-bp rbcS terminator from BP1 (1098-1217), and a PCR RE primer (1218-1237) at the 3′ end.

[0206] SEQ ID NO: 80 presents example 80 of a designer nirA-promoter-controlled Threonine Synthase (51) DNA construct (1438 bp) that includes a PCR FD primer (sequence 1-20), a 231-bp nirA promoter from Thermosynechococcus (21-251), an enzyme-encoding sequence (252-1298) selected from the sequences of a Thermotoga Threonine Synthase (YP_{—}001243978), a 120-bp rbcS terminator from BP1 (1299-1418), and a PCR RE primer (1419-1438).

[0207] SEQ ID NO: 81 presents example 81 of a designer nirA-promoter-controlled Threonine Ammonia-Lyase (52) DNA construct (1600 bp) consisting of a PCR FD primer (sequence 1-20), a 231-bp nirA promoter from Thermosynechococcus elongatus BP1 (21-251), an enzyme-encoding sequence (252-1460) selected/modified from the sequences of a Geobacillus kaustophilus threonine ammonia-lyase (BAD75876), a 120-bp rbcS terminator from BP1 (1461-1580), and a PCR RE primer (1581-1600) at the 3′ end.

[0208] Note, SEQ ID NOS: 58-61, 74-81, 66-69, and 72 (and/or 73) represent a set of sample designer genes that can express a Calvin-cycle 3-phosphoglycerate-branched photosynthetic NADPH-enhanced 1-butanol production pathway of 34, 35, 03, 04, 45-52, 40, 41, 39, 42, and 12 while SEQ ID NOS: 58-69 and 72 (and/or 73) represent another set of sample designer genes that can express another Calvin-cycle 3-phosphoglycerate-branched photosynthetic NADPH-enhanced 1-butanol production pathway as numerically labeled as 34, 35, 03-05, 36-42, and 12 in FIG. 4. The net results of the designer photosynthetic NADPH-enhanced pathways in working with the Calvin cycle are photobiological production of 1-butanol (CH₃CH₂CH₂CH₂OH) from carbon dioxide (CO₂) and water (H₂O) using photosynthetically generated ATP (Adenosine triphosphate) and NADPH (reduced nicotinamide adenine dinucleotide phosphate) according to the following process reaction:

4CO₂+5H₂O→CH₃CH₂CH₂CH₂OH+6O₂ [5]

### Designer Calvin-Cycle-Channeled 2-Methyl-1-Butanol Producing Pathways

[0209] According to one of the various embodiments, a designer Calvin-cycle-channeled 2-Methyl-1-Butanol production pathway is created that takes the Calvin-cycle intermediate product, 3-phosphoglycerate, and converts it into 2-methyl-1-butanol by using, for example, a set of enzymes consisting of (as shown with the numerical labels 34, 35, 03-05, 36-39, 53-55, 42, 43 or 44/56 in FIG. 5): NADPH-dependent glyceraldehyde-3-phosphate dehydrogenase 34, NAD-dependent glyceraldehyde-3-phosphate dehydrogenase 35, phosphoglycerate mutase 03, enolase 04, pyruvate kinase 05, citramalate synthase 36, 2-methylmalate dehydratase 37, 3-isopropylmalate dehydratase 38, 3-isopropylmalate dehydrogenase 39, acetolactate synthase 53, ketol-acid reductoisomerase 54, dihydroxy-acid dehydratase 55, 2-keto acid decarboxylase 42, and NAD-dependent alcohol dehydrogenase 43 (or NADPH-dependent alcohol dehydrogenase 44; more preferably, 2-methylbutyraldehyde reductase 56).

[0210] In another embodiment, a designer Calvin-cycle-channeled 2-methyl-1-butanol production pathway is created that takes the intermediate product, 3-phosphoglycerate, and converts it into 2-methyl-1-butanol by using, for example, a set of enzymes consisting of (as shown with the numerical labels 34, 35, 03, 04, 45-55, 42, 43 or 44/56 in FIG. 5): NADPH-dependent glyceraldehyde-3-phosphate dehydrogenase 34, NAD-dependent glyceraldehyde-3-phosphate dehydrogenase 35, phosphoglycerate mutase 03, enolase 04, phosphoenolpyruvate carboxylase 45, aspartate aminotransferase 46, aspartokinase 47, aspartate-semialdehyde dehydrogenase 48, homoserine dehydrogenase 49, homoserine kinase 50, threonine synthase 51, threonine ammonia-lyase 52, acetolactate synthase 53, ketol-acid reductoisomerase 54, dihydroxy-acid dehydratase 55, 2-keto acid decarboxylase 42, and NAD dependent alcohol dehydrogenase 43 (or NADPH dependent alcohol dehydrogenase 44; more preferably, 2-methylbutyraldehyde reductase 56).

[0211] These pathways (FIG. 5) are quite similar to those of FIG. 4, except that acetolactate synthase 53, ketol-acid reductoisomerase 54, dihydroxy-acid dehydratase 55, and 2-methylbutyraldehyde reductase 56 are used to produce 2-Methyl-1-Butanol.

[0212] SEQ ID NO: 82 presents example 82 of a designer nirA-promoter-controlled Acetolactate Synthase (53) DNA construct (2107 bp) that includes a PCR FD primer (sequence 1-20), a 231-bp nirA promoter from Thermosynechococcus elongatus BP1 (21-251), an acetolactate synthase-encoding sequence (252-1967) selected/modified from the sequences of a Bacillus subtilis subsp. subtilis str. 168 acetolactate synthase (CAB07802), a 120-bp rbcS terminator from BP1 (1968-2087), and a PCR RE primer (2088-2107) at the 3′ end.

[0213] SEQ ID NO: 83 presents example 83 of a designer nirA-promoter-controlled Ketol-Acid Reductoisomerase (54) DNA construct (1405 bp) that includes a PCR FD primer (sequence 1-20), a 231-bp nirA promoter from Thermosynechococcus elongatus BP1 (21-251), a ketol-acid reductoisomerase-encoding sequence (252-1265) selected/modified from the sequences of a Syntrophothermus lipocalidus DSM 12680 ketol-acid reductoisomerase (ADIO2902), a 120-bp rbcS terminator from BP1 (1266-1385), and a PCR RE primer (1386-1405) at the 3′ end.

[0214] SEQ ID NO: 84 presents example 84 of a designer nirA-promoter-controlled Dihydroxy-Acid Dehydratase (55) DNA construct (2056 bp) that includes a PCR FD primer (1-20), a 231-bp nirA promoter from Thermosynechococcus elongatus BP1 (21-251), an enzyme-encoding sequence (252-1916) selected from the sequences of a Thermotoga dihydroxy-acid dehydratase (YP_{—}001243973), a 120-bp rbcS terminator from BP1 (1917-2036), and a PCR RE primer (2037-2056).

[0215] SEQ ID NO: 85 presents example 85 of a designer nirA-promoter-controlled 2-Methylbutyraldehyde Reductase (56) DNA construct (1360 bp) that includes a PCR FD primer (sequence 1-20), a 231-bp nirA promoter from Thermosynechococcus elongatus BP1 (21-251), an enzyme-encoding sequence (252-1220) selected/modified from the sequences of a Schizosaccharomyces japonicus 2-methylbutyraldehyde reductase (XP_{—}002173231), a 120-bp rbcS terminator from BP1 (1221-1340), and a PCR RE primer (1341-1360) at the 3′ end.

[0216] Note, SEQ ID NOS: 58-66, 82-84, 69 and 85 represent another set of sample designer genes that can express a Calvin-cycle 3-phosphoglycerate-branched photosynthetic NADPH-enhanced 2-methyl-1-butanol production pathway numerically labeled as 34, 35, 03-05, 36-39, 53-55, 42 and 56; while SEQ ID NOS: 58-61, 74-84, 69 and 85 represent a set of sample designer genes that can express another Calvin-cycle 3-phosphoglycerate-branched photosynthetic NADPH-enhanced 2-methyl-1-butanol production pathway of 34, 35, 03, 04, 45-55, 42 and 56 in FIG. 5. These designer genes can be used in combination with other pathway gene(s) to express certain other pathways such as a Calvin-cycle Fructose-6-phosphate branched 2-methyl-1-butanol production pathway numerically labeled as 13-26, 36-39, 53-55, 42 and 56 (and/or, as 13-25, 45-55, 42 and 56) in FIG. 5 as well. The net results of the designer photosynthetic NADPH-enhanced pathways in working with the Calvin cycle are production of 2-methyl-1-butanol [CH₃CH₂CH(CH₃)CH₂OH] from carbon dioxide (CO₂) and water (H₂O) using photosynthetically generated ATP and NADPH according to the following process reaction:

10CO₂+12H₂O→2CH₃CH₂CH(CH₃)CH₂OH+15O₂ [6]

### Calvin-Cycle-Channeled Pathways for Production of Isobutanol and 3-Methyl-1-Butanol

[0217] According to one of the various embodiments, a designer Calvin-cycle-channeled pathway is created that takes the Calvin-cycle intermediate product, 3-phosphoglycerate, and converts it into isobutanol by using, for example, a set of enzymes consisting of (as shown with numerical labels 34, 35, 03-05, 53-55, 42, 43 (or 44) in FIG. 6): NADPH-dependent glyceraldehyde-3-phosphate dehydrogenase 34, NAD-dependent glyceraldehyde-3-phosphate dehydrogenase 35, phosphoglycerate mutase 03, enolase 04, pyruvate kinase 05, acetolactate synthase 53, ketol-acid reductoisomerase 54, dihydroxy-acid dehydratase 55, 2-keto acid decarboxylase 42, and NAD-dependent alcohol dehydrogenase 43 (or NADPH-dependent alcohol dehydrogenase 44). The net result of this pathway in working with the Calvin cycle is photobiological production of isobutanol ((CH₃)₂CHCH₂OH) from carbon dioxide (CO₂) and water (H₂O) using photosynthetically generated ATP and NADPH according to the following process reaction:

4CO₂+5H₂O→(CH₃)₂CHCH₂OH+6O₂ [7]

[0218] According to another embodiment, a designer Calvin-cycle-channeled pathway is created that takes the intermediate product, 3-phosphoglycerate, and converts it into 3-methyl-1-butanol by using, for example, a set of enzymes consisting of (as shown with the numerical labels 34, 35, 03-05, 53-55, 40, 38, 39, 42, 43 (or 44/57) in FIG. 6): NADPH-dependent glyceraldehyde-3-phosphate dehydrogenase 34, NAD-dependent glyceraldehyde-3-phosphate dehydrogenase 35, phosphoglycerate mutase 03, enolase 04, pyruvate kinase 05, acetolactate synthase 53, ketol-acid reductoisomerase 54, dihydroxy-acid dehydratase 55, 2-isopropylmalate synthase 40, 3-isopropylmalate dehydratase 38, 3-isopropylmalate dehydrogenase 39, 2-keto acid decarboxylase 42, and NAD-dependent alcohol dehydrogenase 43 (or NADPH-dependent alcohol dehydrogenase 44; or more preferably, 3-methylbutanal reductase 57). The net result of this pathway in working with the Calvin cycle is photobiological production of 3-methyl-1-butanol (CH₃CH(CH₃)CH₂CH₂OH) from carbon dioxide (CO₂) and water (H₂O) using photosynthetically generated ATP and NADPH according to the following process reaction:

10CO₂+12H₂O→4CH₃CH(CH₃)CH₂CH₂OH+15O₂ [8]

[0219] These designer pathways (FIG. 6) share a number of designer pathway enzymes with those of FIGS. 4 and 5, except that a 3-methylbutanal reductase 57 is preferably used for production of 3-methyl-1-butanol; they all have a common feature of using an NADPH-dependent glyceraldehyde-3-phosphate dehydrogenase 34 and an NAD-dependent glyceraldehyde-3-phosphate dehydrogenase 35 as an NADPH/NADH conversion mechanism to covert certain amount of photosynthetically generated NADPH to NADH which can be used by NADH-requiring pathway enzymes such as an NADH-requiring alcohol dehydrogenase 43.

[0220] SEQ ID NO: 86 presents example 86 of a designer nirA-promoter-controlled 3-Methylbutanal Reductase (57) DNA construct (1420 bp) that includes a PCR FD primer (sequence 1-20), a 231-bp nirA promoter from Thermosynechococcus elongatus BP1 (21-251), an enzyme-encoding sequence (252-1280) selected/modified from the sequences of a Saccharomyces cerevisiae S288c 3-Methylbutanal reductase (DAA10635), a 120-bp rbcS terminator from BP1 (1281-1400), and a PCR RE primer (1401-1420) at the 3′ end.

[0221] SEQ ID NOS: 58-62, 82-84, 69, 70 (or 71) represent a set of sample designer genes that can express a Calvin-cycle 3-phosphoglycerate-branched photosynthetic NADPH-enhanced isobutanol production pathway (34, 35, 03-05, 53-55, 42, 43 or 44); while SEQ ID NOS: 58-62, 82-84, 65-67, 69 and 86 represent another set of sample designer genes that can express a Calvin-cycle 3-phosphoglycerate-branched photosynthetic NADPH-enhanced 3-methyl-1-butanol production pathway (34, 35, 03-05, 53-55, 40, 38, 39, 42, and 57 in FIG. 6).

[0222] These designer genes can be used with certain other designer genes to express certain other pathways such as a Calvin-cycle Fructose-6-phosphate-branched 3-methyl-1-butanol production pathway shown as 13-26, 53-54, 39-40, 42 and 57 (or 43/44) in FIG. 6 as well. The net results of the designer photosynthetic NADPH-enhanced pathways in working with the Calvin cycle are also production of isobutanol ((CH₃)₂CHCH₂OH) and/or 3-methyl-1-butanol (CH₃CH(CH₃)CH₂CH₂OH) from carbon dioxide (CO₂) and water (H₂O) using photosynthetically generated ATP and NADPH.

### Designer Calvin-Cycle-Channeled Pathways for Production of 1-Hexanol and 1-Octanol

[0223] According to one of the various embodiments, a designer Calvin-cycle-channeled pathway is created that takes the Calvin-cycle intermediate product, 3-phosphoglycerate, and converts it into 1-hexanol by using, for example, a set of enzymes consisting of (as shown with the numerical labels 34, 35, 03-10, 07′-12′ in FIG. 7): NADPH-dependent glyceraldehyde-3-phosphate dehydrogenase 34, NAD-dependent glyceraldehyde-3-phosphate dehydrogenase 35, phosphoglycerate mutase 03, enolase 04, pyruvate kinase 05, pyruvate-ferredoxin oxidoreductase 06, thiolase 07, 3-hydroxybutyryl-CoA dehydrogenase 08, crotonase 09, butyryl-CoA dehydrogenase 10, designer 3-ketothiolase 07′, designer 3-hydroxyacyl-CoA dehydrogenase 08′, designer enoyl-CoA dehydratase 09′, designer 2-enoyl-CoA reductase 10′, designer acyl-CoA reductase 11′, and hexanol dehydrogenase 12′. The net result of this designer pathway in working with the Calvin cycle is photobiological production of 1-hexanol (CH₃CH₂CH₂CH₂CH₂CH₂OH) from carbon dioxide (CO₂) and water (H₂O) using photosynthetically generated ATP and NADPH according to the following process reaction:

6CO₂+7H₂O→CH₃CH₂CH₂CH₂CH₂CH₂OH+9O₂ [9]

[0224] According to another embodiment, a designer Calvin-cycle-channeled pathway is created that takes the intermediate product, 3-phosphoglycerate, and converts it into 1-octanol by using, for example, a set of enzymes consisting of (as shown with the numerical labels 34, 35, 03-10, 07′-10′, and 07″-12″ in FIG. 7): NADPH-dependent glyceraldehyde-3-phosphate dehydrogenase 34, NAD-dependent glyceraldehyde-3-phosphate dehydrogenase 35, phosphoglycerate mutase 03, enolase 04, pyruvate kinase 05, pyruvate-ferredoxin oxidoreductase 06, thiolase 07, 3-hydroxybutyryl-CoA dehydrogenase 08, crotonase 09, butyryl-CoA dehydrogenase 10, designer 3-ketothiolase 07′, designer 3-hydroxyacyl-CoA dehydrogenase 08′, designer enoyl-CoA dehydratase 09′, designer 2-enoyl-CoA reductase 10′, designer 3-ketothiolase 07″, designer 3-hydroxyacyl-CoA dehydrogenase 08″, designer enoyl-CoA dehydratase 09″, designer 2-enoyl-CoA reductase 10″, designer acyl-CoA reductase 11″, and octanol dehydrogenase 12″.

[0225] These pathways represent a significant upgrade in the pathway designs with part of a previously disclosed 1-butanol production pathway (03-10). The key feature is the utilization of an NADPH-dependent glyceraldehyde-3-phosphate dehydrogenase 34 and an NAD-dependent glyceraldehyde-3-phosphate dehydrogenase 35 as a mechanism for NADPH/NADH conversion to drive an NADH-requiring designer hydrocarbon chain elongation pathway (07′-10′) for 1-hexanol production (07′-12′ as shown in FIG. 7).

[0226] SEQ ID NOS: 87-92 represent a set of designer genes that can express the designer hydrocarbon chain elongation pathway for 1-hexanol production (07′-12′ as shown in FIG. 7). Briefly, SEQ ID NO: 87 presents example 87 of a designer nirA-promoter-controlled 3-Ketothiolase (07′) DNA construct (1540 bp) that includes a PCR FD primer (sequence 1-20), a 231-bp nirA promoter from Thermosynechococcus elongatus BP1 (21-251), an enzyme-encoding sequence (252-1400) selected/modified from the sequences of a Geobacillus kaustophilus 3-Ketothiolase (YP_{—}147173), a 120-bp rbcS terminator from BP1 (1401-1520), and a PCR RE primer (1521-1540).

[0227] SEQ ID NO: 88 presents example 88 of a designer nirA-promoter-controlled 3-Hydroxyacyl-CoA Dehydrogenase (08′) DNA construct (1231 bp) that includes a PCR FD primer (sequence 1-20), a 231-bp nirA promoter from Thermosynechococcus elongatus BP1 (21-251), an enzyme-encoding sequence (252-1091) selected/modified from the sequences of a Syntrophothermus lipocalidus 3-Hydroxyacyl-CoA dehydrogenase (YP_{—}003702743), a 120-bp rbcS terminator from BP1 (1092-1211), and a PCR RE primer (1212-1231).

[0228] SEQ ID NO: 89 presents example 89 of a designer nirA-promoter-controlled Enoyl-CoA Dehydratase (09′) DNA construct (1162 bp) that includes a PCR FD primer (sequence 1-20), a 231-bp nirA promoter from Thermosynechococcus elongatus BP1 (21-251), an enzyme-encoding sequence (252-1022) selected/modified from the sequences of a Bordetella petrii Enoyl-CoA dehydratase (CAP41574), a 120-bp rbcS terminator from BP1 (1023-1442), and a PCR RE primer (1443-1162) at the 3′ end.

[0229] SEQ ID NO: 90 presents example 90 of a designer nirA-promoter-controlled 2-Enoyl-CoA Reductase (10′) DNA construct (1561 bp) that includes a PCR FD primer (sequence 1-20), a 231-bp nirA promoter from Thermosynechococcus elongatus BP1 (21-251), an enzyme-encoding sequence (252-1421) selected/modified from the sequences of a Xanthomonas campestris 2-Enoyl-CoA Reductase (CAP53709), a 120-bp rbcS terminator from BP1 (1422-1541), and a PCR RE primer (1542-1561).

[0230] SEQ ID NO: 91 presents example 91 of a designer nirA-promoter-controlled Acyl-CoA Reductase (11′) DNA construct (1747 bp) that includes a PCR FD primer (sequence 1-20), a 231-bp nirA promoter from Thermosynechococcus elongatus BP1 (21-251), an enzyme-encoding sequence (252-1607) selected/modified from the sequences of a Clostridium cellulovorans Acyl-CoA reductase (YP_{—}003845606), a 120-bp rbcS terminator from BP1 (1608-1727), and a PCR RE primer (1728-1747).

[0231] SEQ ID NO: 92 presents example 92 of a designer nirA-promoter-controlled Hexanol Dehydrogenase (12′) DNA construct (1450 bp) that includes a PCR FD primer (sequence 1-20), a 231-bp nirA promoter from Thermosynechococcus elongatus BP1 (21-251), an enzyme-encoding sequence (252-1310) selected/modified from the sequences of a Mycobacterium chubuense hexanol dehydrogenase (ACZ56328), a 120-bp rbcS terminator from BP1 (1311-1430), and a PCR RE primer (1431-1450).

[0232] SEQ ID NO: 93 presents example 93 of a designer nirA-promoter-controlled Octanol Dehydrogenase (12″) DNA construct (1074 bp) that includes a PCR FD primer (sequence 1-20), a 231-bp nirA promoter from Thermosynechococcus elongatus BP1 (21-251), an enzyme-encoding sequence (252-934) selected/modified from the sequences of a Drosophila subobscura octanol dehydrogenase (ABO65263), a 120-bp rbcS terminator from BP1 (935-1054), and a PCR RE primer (1055-1074) at the 3′ end.

[0233] Note, the designer enzymes of SEQ ID NOS: 87-91 have certain broad substrate specificity. Consequently, they can also be used as designer 3-ketothiolase 07″, designer 3-hydroxyacyl-CoA dehydrogenase 08″, designer enoyl-CoA dehydratase 09″, designer 2-enoyl-CoA reductase 10″, and designer acyl-CoA reductase 11″. Therefore, SEQ ID NOS: 87-91 and 93 represent a set of designer genes that can express another designer hydrocarbon chain elongation pathway for 1-octanol production (07′40′ and 07″-12″ as shown in FIG. 7). SEQ ID NO: 93 (encoding for octanol dehydrogenase 12″) is one of the key designer genes that enable production of 1-octanol production in this pathway. The net result of this pathway in working with the Calvin cycle are photobiological production of 1-octanol (CH₃CH₂CH₂CH₂CH₂CH₂CH₂CH₂OH) from carbon dioxide (CO₂) and water (H₂O) using photosynthetically generated ATP and NADPH according to the following process reaction:

8CO₂+9H₂O→CH₃CH₂CH₂CH₂CH₂CH₂CH₂CH₂OH+12O₂ [10]

### Calvin-Cycle-Channeled Pathways for Production of 1-Pentanol, 1-Hexanol and 1-Heptanol

[0234] According to one of the various embodiments, a designer Calvin-cycle-channeled pathway is created that takes the Calvin-cycle intermediate product, 3-phosphoglycerate, and converts it into 1-pentanol, 1-hexanol, and/or 1-heptanol by using, for example, a set of enzymes consisting of (as shown with the numerical labels 34, 35, 03-05, 36-41, 39, 39′-43′, 39′-43′, 12′, and 39″-43″ in FIG. 8): NADPH-dependent glyceraldehyde-3-phosphate dehydrogenase 34, NAD-dependent glyceraldehyde-3-phosphate dehydrogenase 35, phosphoglycerate mutase 03, enolase 04, pyruvate kinase 05, citramalate synthase 36, 2-methylmalate dehydratase 37, 3-isopropylmalate dehydratase 38, 3-isopropylmalate dehydrogenase 39, 2-isopropylmalate synthase 40, isopropylmalate isomerase 41, 3-isopropylmalate dehydrogenase 39, designer isopropylmalate synthase 40′, designer isopropylmalate isomerase 41′, designer 3-isopropylmalate dehydrogenase 39′, designer 2-keto acid decarboxylase 42′, short-chain alcohol dehydrogenase 43′, hexanol dehydrogenase 12′, designer isopropylmalate synthase 40″, designer isopropylmalate isomerase 41″, designer 3-isopropylmalate dehydrogenase 39″, designer 2-keto acid decarboxylase 42″, and designer short-chain alcohol dehydrogenase 43″. This designer pathway works with the Calvin cycle using photosynthetically generated ATP and NADPH for photobiological production of 1-pentanol (CH₃CH₂CH₂CH₂CH₂OH), 1-hexanol (CH₃CH₂CH₂CH₂CH₂CH₂OH), and/or 1-heptanol (CH₃CH₂CH₂CH₂CH₂CH₂CH₂OH) from carbon dioxide (CO₂) and water (H₂O) according to the following process reactions:

10CO₂+12H₂O→2CH₃CH₂CH₂CH₂CH₂OH+15O₂ [11]

6CO₂+7H₂O→CH₃CH₂CH₂CH₂CH₂CH₂OH+9O₂ [12]

14CO₂+16H₂O→2CH₃CH₂CH₂CH₂CH₂CH₂CH₂OH+21O₂ [13]

[0235] According to another embodiment, a designer Calvin-cycle-channeled pathway is created that takes the intermediate product, 3-phosphoglycerate, and converts it into 1-pentanol, 1-hexanol, and/or 1-heptanol by using, for example, a set of enzymes consisting of (as shown with the numerical labels 34, 35, 03, 04, 45-52, 40, 41, 39, 39′-43′, 39′-43′, 12′, and 39″-43″ in FIG. 8): NADPH-dependent glyceraldehyde-3-phosphate dehydrogenase 34, NAD-dependent glyceraldehyde-3-phosphate dehydrogenase 35, phosphoglycerate mutase 03, enolase 04, phosphoenolpyruvate carboxylase 45, aspartate aminotransferase 46, aspartokinase 47, aspartate-semialdehyde dehydrogenase 48, homoserine dehydrogenase 49, homoserine kinase 50, threonine synthase 51, threonine ammonia-lyase 52, 2-isopropylmalate synthase 40, isopropylmalate isomerase 41, 3-isopropylmalate dehydrogenase 39, designer isopropylmalate synthase 40′, designer isopropylmalate isomerase 41′, designer 3-isopropylmalate dehydrogenase 39′, designer 2-keto acid decarboxylase 42′, short-chain alcohol dehydrogenase 43′, hexanol dehydrogenase 12′, designer isopropylmalate synthase 40″, designer isopropylmalate isomerase 41″, designer 3-isopropylmalate dehydrogenase 39″, designer 2-keto acid decarboxylase 42″, and designer short-chain alcohol dehydrogenase 43″.

[0236] These pathways (FIG. 8) share a common feature of using an NADPH-dependent glyceraldehyde-3-phosphate dehydrogenase 34 and an NAD-dependent glyceraldehyde-3-phosphate dehydrogenase 35 as a mechanism for NADPH/NADH conversion to drive production of 1-pentanol, 1-hexanol, and/or 1-heptanol through a designer Calvin-cycle-channeled pathway in combination with a designer hydrocarbon chain elongation pathway (40′, 41′, 39′). This embodiment also takes the advantage of the broad substrate specificity (promiscuity) of 2-isopropylmalate synthase 40, isopropylmalate isomerase 41, 3-isopropylmalate dehydrogenase 39, 2-keto acid decarboxylase 42, and short-chain alcohol dehydrogenase 43 so that they can be used also as: designer isopropylmalate synthase 40′, designer isopropylmalate isomerase 41′, designer 3-isopropylmalate dehydrogenase 39′, designer 2-keto acid decarboxylase 42′, and short-chain alcohol dehydrogenase 43′; isopropylmalate synthase 40″, designer isopropylmalate isomerase 41″, designer 3-isopropylmalate dehydrogenase 39″, designer 2-keto acid decarboxylase 42″, and designer short-chain alcohol dehydrogenase 43″.

[0237] In this case, proper selection of a short-chain alcohol dehydrogenase with certain promiscuity is also essential. SEQ ID NO: 94 presents example 94 of a designer nirA-promoter-controlled Short Chain Alcohol Dehydrogenase DNA construct (1096 bp) that includes a PCR FD primer (sequence 1-20), a 231-bp nirA promoter from Thermosynechococcus elongatus BP1 (21-251), an enzyme-encoding sequence (252-956) selected/modified from the sequences of a Pyrococcus furiosus DSM 3638 Short chain alcohol dehydrogenase (AAC25556), a 120-bp rbcS terminator from BP1 (957-1076), and a PCR RE primer (1077-1096) at the 3′ end.

[0238] Therefore, SEQ ID NOS: 58-69 and 94 represent a set of designer genes that can express a designer Calvin-cycle 3-phosphoglycerate-branched photosynthetic NADPH-enhanced pathway for production of 1-pentanol, 1-hexanol, and/or 1-heptanol as shown with numerical labels 34, 35, 03-05, 36-41, 39, 39′-43′, 39′-43′, 39″-43″ in FIG. 8. Similarly, SEQ ID NOS: 58-61, 74-81, 66-69, and 94 represent another set of sample designer genes that can express another Calvin-cycle 3-phosphoglycerate-branched NADPH-enhanced pathway for production of 1-pentanol, 1-hexanol, and/or 1-heptanol as numerically labeled as 34, 35, 03, 04, 45-52, 40, 41, 39, 39′-43′, 39′-43′, 39″-43″ in FIG. 8. Note, both of these two pathways produce alcohol mixtures with different chain lengths rather than single alcohols since all 2-keto acids (such as 2-ketohexanoate, 2-ketoheptanoate, and 2-ketooctanoate) can be converted to alcohol because of the use of the promiscuity of designer 2-keto acid decarboxylase 42′ and designer short-chain alcohol dehydrogenase 43′.

[0239] To improve product specificity, it is a preferred practice to use substrate specific designer enzymes. For example, use of substrate specific designer 1-hexanol dehydrogenase 12′ (SEQ ID NO: 92) instead of short-chain alcohol dehydrogenase with promiscuity (43′) can improve product specificity more toward 1-hexanol. Consequently, SEQ ID NOS: 58-69 and 92 represent a set of designer genes that can express a designer Calvin-cycle 3-phosphoglycerate-branched photosynthetic NADPH-enhanced pathway for production of 1-hexanol as shown with numerical labels 34, 35, 03-05, 36-41, 39, 39′-40′, 39′-42′ and 12′ in FIG. 8.

### Designer Calvin-Cycle-Channeled Pathways for Production of 3-Methyl-1-Pentanol, 4-Methyl-1-Hexanol, and 5-Methyl-1-Heptanol

[0240] According to one of the various embodiments, a designer Calvin-cycle-channeled pathway is created that takes the Calvin-cycle intermediate product, 3-phosphoglycerate, and converts it into 3-methyl-1-pentanol, 4-methyl-1-hexanol, and/or 5-methyl-1-heptanol by using, for example, a set of enzymes consisting of (as shown with the numerical labels 34, 35, 03-05, 36-39, 53-55, 39′-43′, 39′-43′, and 39″-43″ in FIG. 9): NADPH-dependent glyceraldehyde-3-phosphate dehydrogenase 34, NAD-dependent glyceraldehyde-3-phosphate dehydrogenase 35, phosphoglycerate mutase 03, enolase 04, pyruvate kinase 05, citramalate synthase 36, 2-methylmalate dehydratase 37, 3-isopropylmalate dehydratase 38, 3-isopropylmalate dehydrogenase 39, acetolactate synthase 53, ketol-acid reductoisomerase 54, dihydroxy-acid dehydratase 55, designer isopropylmalate synthase 40′, designer isopropylmalate isomerase 41′, designer 3-isopropylmalate dehydrogenase 39′, designer 2-keto acid decarboxylase 42′, short-chain alcohol dehydrogenase 43′, designer isopropylmalate synthase 40″, designer isopropylmalate isomerase 41″, designer 3-isopropylmalate dehydrogenase 39″, designer 2-keto acid decarboxylase 42″, and designer short-chain alcohol dehydrogenase 43″.

[0241] According to another embodiment, a designer Calvin-cycle-channeled pathway is created that takes the intermediate product, 3-phosphoglycerate, and converts it into 3-methyl-1-pentanol, 4-methyl-1-hexanol, and/or 5-methyl-1-heptanol by using, for example, a set of enzymes consisting of (as shown with the numerical labels 34, 35, 03, 04, 45-55, 39′-43′, 39′-43′, and 39″-43″ in FIG. 9): NADPH-dependent glyceraldehyde-3-phosphate dehydrogenase 34, NAD-dependent glyceraldehyde-3-phosphate dehydrogenase 35, phosphoglycerate mutase 03, enolase 04, phosphoenolpyruvate carboxylase 45, aspartate aminotransferase 46, aspartokinase 47, aspartate-semialdehyde dehydrogenase 48, homoserine dehydrogenase 49, homoserine kinase 50, threonine synthase 51, threonine ammonia-lyase 52, acetolactate synthase 53, ketol-acid reductoisomerase 54, dihydroxy-acid dehydratase 55, designer isopropylmalate synthase 40′, designer isopropylmalate isomerase 41′, designer 3-isopropylmalate dehydrogenase 39′, designer 2-keto acid decarboxylase 42′, short-chain alcohol dehydrogenase 43′, designer isopropylmalate synthase 40″, designer isopropylmalate isomerase 41″, designer 3-isopropylmalate dehydrogenase 39″, designer 2-keto acid decarboxylase 42″, and designer short-chain alcohol dehydrogenase 43″.

[0242] These pathways (FIG. 9) are similar to those of FIG. 8, except they use acetolactate synthase 53, ketol-acid reductoisomerase 54, dihydroxy-acid dehydratase 55 as part of the pathways for production of 3-methyl-1-pentanol, 4-methyl-1-hexanol, and/or 5-methyl-1-heptanol. They all share a common feature of using an NADPH-dependent glyceraldehyde-3-phosphate dehydrogenase 34 and an NAD-dependent glyceraldehyde-3-phosphate dehydrogenase 35 as a mechanism for NADPH/NADH conversion to drive production of 3-methyl-1-pentanol, 4-methyl-1-hexanol, and/or 5-methyl-1-heptanol through a designer Calvin-cycle-channeled pathway in combination with a hydrocarbon chain elongation pathway (40′, 41′, 39′). This embodiment also takes the advantage of the broad substrate specificity (promiscuity) of 2-isopropylmalate synthase 40, isopropylmalate isomerase 41, 3-isopropylmalate dehydrogenase 39, 2-keto acid decarboxylase 42, and short-chain alcohol dehydrogenase 43 so that they can also serve as: designer isopropylmalate synthase 40′, designer isopropylmalate isomerase 41′, designer 3-isopropylmalate dehydrogenase 39′, designer 2-keto acid decarboxylase 42′, and short-chain alcohol dehydrogenase 43′; designer isopropylmalate synthase 40″, designer isopropylmalate isomerase 41″, designer 3-isopropylmalate dehydrogenase 39″, designer 2-keto acid decarboxylase 42″, and designer short-chain alcohol dehydrogenase 43″.

[0243] Therefore, SEQ ID NOS: 58-69, 82-84, and 94 represent a set of designer genes that can express a designer Calvin-cycle 3-phosphoglycerate-branched photosynthetic NADPH-enhanced pathway for production of 3-methyl-1-pentanol, 4-methyl-1-hexanol, and 5-methyl-1-heptanol as shown with numerical labels 34, 35, 03-05, 36-39, 53-55, 39′-43′, 39′-43′, and 39″-43″ in FIG. 9. Similarly, SEQ ID NOS: 58-61, 74-81, 82-84, 66-69, and 94 represent another set of sample designer genes that can express another Calvin-cycle 3-phosphoglycerate-branched NADPH-enhanced pathway for production of 3-methyl-1-pentanol, 4-methyl-1-hexanol, and/or 5-methyl-1-heptanol as numerically labeled as 34, 35, 03, 04, 45-55, 39′-43′, 39′-43′, 39″-43″ in FIG. 9. The net results of the designer photosynthetic NADPH-enhanced pathways in working with the Calvin cycle are production of 3-methyl-1-pentanol (CH₃CH₂CH(CH₃)CH₂CH₂OH), 4-methyl-1-hexanol (CH₃CH₂CH(CH₃)CH₂CH₂CH₂OH), and 5-methyl-1-heptanol (CH₃CH₂CH(CH₃)CH₂CH₂CH₂CH₂OH) from carbon dioxide (CO₂) and water (H₂O) using photosynthetically generated ATP and NADPH according to the following process reactions:

6CO₂+7H₂O→CH₃CH₂CH(CH₃)CH₂CH₂OH+9O₂ [14]

14CO₂+16H₂O→2CH₃CH₂CH(CH₃)CH₂CH₂CH₂OH+21O₂ [15]

8CO₂+9H₂O→CH₃CH₂CH(CH₃)CH₂CH₂CH₂CH₂OH+12O₂ [16]

### Designer Calvin-Cycle-Channeled Pathways for Production of 4-Methyl-1-Pentanol, 5-Methyl-1-Hexanol, and 6-Methyl-1-Heptanol

[0244] According to one of the various embodiments, a designer Calvin-cycle-channeled pathway is created that takes the Calvin-cycle intermediate product, 3-phosphoglycerate, and converts it into 4-methyl-1-pentanol, 5-methyl-1-hexanol, and 6-methyl-1-heptanol by using, for example, a set of enzymes consisting of (as shown with the numerical labels 34, 35, 03-05, 53-55, 40, 38, 39, 39′-43′, 39′-43′, and 39″-43″ in FIG. 10): NADPH-dependent glyceraldehyde-3-phosphate dehydrogenase 34, NAD-dependent glyceraldehyde-3-phosphate dehydrogenase 35, phosphoglycerate mutase 03, enolase 04, pyruvate kinase 05, acetolactate synthase 53, ketol-acid reductoisomerase 54, dihydroxy-acid dehydratase 55, isopropylmalate synthase 40, dehydratase 38, 3-isopropylmalate dehydrogenase 39, designer isopropylmalate synthase 40′, designer isopropylmalate isomerase 41′, designer 3-isopropylmalate dehydrogenase 39′, designer 2-keto acid decarboxylase 42′, short-chain alcohol dehydrogenase 43′, designer isopropylmalate synthase 40″, designer isopropylmalate isomerase 41″, designer 3-isopropylmalate dehydrogenase 39″, designer 2-keto acid decarboxylase 42″, and designer short-chain alcohol dehydrogenase 43″.

[0245] This pathway (FIG. 10) is similar to those of FIG. 8, except that it does not use citramalate synthase 36 and 2-methylmalate dehydratase 37, but uses acetolactate synthase 53, ketol-acid reductoisomerase 54, dihydroxy-acid dehydratase 55 as part of the pathways for production of 4-methyl-1-pentanol 5-methyl-1-hexanol, and/or 6-methyl-1-heptanol. They all share a common feature of using an NADPH-dependent glyceraldehyde-3-phosphate dehydrogenase 34 and an NAD-dependent glyceraldehyde-3-phosphate dehydrogenase 35 as a mechanism for NADPH/NADH conversion to drive production of 3-methyl-1-butanol, 4-methyl-1-butanol, and 5-methyl-1-butanol through a Calvin-cycle-channeled pathway in combination with a designer hydrocarbon chain elongation pathway (40′, 41′, 39′). This embodiment also takes the advantage of the broad substrate specificity (promiscuity) of 2-isopropylmalate synthase 40, isopropylmalate isomerase 41, 3-isopropylmalate dehydrogenase 39, 2-keto acid decarboxylase 42, and short-chain alcohol dehydrogenase 43 so that they may also serve as: designer isopropylmalate synthase 40′, designer isopropylmalate isomerase 41′, designer 3-isopropylmalate dehydrogenase 39′, designer 2-keto acid decarboxylase 42′, and short-chain alcohol dehydrogenase 43′, designer isopropylmalate synthase 40″, designer isopropylmalate isomerase 41″, designer 3-isopropylmalate dehydrogenase 39″, designer 2-keto acid decarboxylase 42″, and designer short-chain alcohol dehydrogenase 43″.

[0246] Therefore, SEQ ID NOS: 58-62, 82-84, 65-69 and 94 represent a set of sample designer genes that can be used to express a designer Calvin-cycle 3-phosphoglycerate-branched photosynthetic NADPH-enhanced pathway for production of 4-methyl-1-pentanol, 5-methyl-1-hexanol, and/or 6-methyl-1-heptanol as shown with numerical labels 34, 35, 03-05, 53-55, 40, 38, 39, 39′-43′, 39′-43′, and 39″-43″ in FIG. 10. The net results of the designer photosynthetic NADPH-enhanced pathway in working with the Calvin cycle are production of 4-methyl-1-pentanol (CH₃CH(CH₃)CH₂CH₂CH₂OH), 5-methyl-1-hexanol (CH₃CH(CH₃)CH₂CH₂CH₂CH₂OH), and 6-methyl-1-heptanol (CH₃CH(CH₃)CH₂CH₂CH₂CH₂CH₂OH) from carbon dioxide (CO₂) and water (H₂O) using photosynthetically generated ATP and NADPH according to the following process reactions:

6CO₂+7H₂O→CH₃CH(CH₃)CH₂CH₂CH₂OH+9O₂ [17]

14CO₂+16H₂O→2CH₃CH(CH₃)CH₂CH₂CH₂CH₂OH+21O₂ [18]

8CO₂+9H₂O→CH₃CH(CH₃)CH₂CH₂CH₂CH₂CH₂OH+12O₂ [19]

Designer Oxyphotobacteria with Calvin-Cycle-Channeled Pathways for Production of Butanol and Related Higher Alcohols

[0247] According to one of the various embodiments, use of designer DNA constructs in genetic transform of certain oxyphotobacteria hosts can create various designer transgenic oxyphotobacteria with Calvin-cycle-channeled pathways for photobiological production of butanol and related higher alcohols from carbon dioxide and water. To ensure biosafety for use of the designer transgenic photosynthetic organism-based biofuels production technology, it is a preferred practice to incorporate biosafety-guarded features into the designer transgenic photosynthetic organisms as well. Therefore, in accordance with the present invention, various designer photosynthetic organisms including designer transgenic oxyphotobacteria are created with a biosafety-guarded photobiological biofuel-production technology based on cell-division-controllable designer transgenic photosynthetic organisms. The cell-division-controllable designer photosynthetic organisms contain two key functions: a designer biosafety mechanism(s) and a designer biofuel-production pathway(s). The designer biosafety feature(s) is conferred by a number of mechanisms including: a) the inducible insertion of designer proton-channels into cytoplasm membrane to permanently disable any cell division and/or mating capability, b) the selective application of designer cell-division-cycle regulatory protein or interference RNA (iRNA) to permanently inhibit the cell division cycle and preferably keep the cell at the G₁ phase or G₀ state, and c) the innovative use of a high-CO₂-requiring host photosynthetic organism for expression of the designer biofuel-production pathway(s). The designer cell-division-control technology can help ensure biosafety in using the designer organisms for biofuel production.

[0248] Oxyphotobacteria (including cyanobacteria and oxychlorobacteria) that can be selected for use as host organisms to create designer transgenic oxyphotobacteria for photobiological production of butanol and related higher alcohols include (but not limited to): Thermosynechococcus elongatus BP-1, Nostoc sp. PCC 7120, Synechococcus elongatus PCC 6301, Syncechococcus sp. strain PCC 7942, Syncechococcus sp. strain PCC 7002, Syncechocystis sp. strain PCC 6803, Prochlorococcus marinus MED4, Prochlorococcus marinus MIT 9313, Prochlorococcus marinus NATL1A, Prochlorococcus SS120, Spirulina platensis (Arthrospira platensis), Spirulina pacifica, Lyngbya majuscule, Anabaena sp., Synechocystis sp., Synechococcus elongates, Synechococcus (MC-A), Trichodesmium sp., Richelia intracellularis, Synechococcus WH7803, Synechococcus WH8102, Nostoc punctiforme, Syncechococcus sp. strain PCC 7943, Synechocyitis PCC 6714 phycocyanin-deficient mutant PD-1, Cyanothece strain 51142, Cyanothece sp. CCY0110, Oscillatoria limosa, Lyngbya majuscula, Symploca muscorum, Gloeobacter violaceus, Prochloron didemni, Prochlorothrix hollandica, Prochlorococcus marinus, Prochlorococcus SS120, Synechococcus WH8102, Lyngbya majuscula, Symploca muscorum, Synechococcus bigranulatus, cryophilic Oscillatoria sp., Phormidium sp., Nostoc sp.-1, Calothrix parietina, thermophilic Synechococcus bigranulatus, Synechococcus lividus, thermophilic Mastigocladus laminosus, Chlorogloeopsis fritschii PCC 6912, Synechococcus vulcanus, Synechococcus sp. strain MA4, Synechococcus sp. strain MA19, and Thermosynechococcus elongatus.

[0249] According to one of the examples, use of designer DNA constructs such as SEQ ID NOS: 58-94 in genetic transform of certain oxyphotobacteria hosts such as Thermosynechococcus elongatus BP1 can create a series of designer transgenic oxyphotobacteria with Calvin-cycle-channeled pathways for production of butanol and related higher alcohols. Consequently, SEQ ID NOS: 58-61, 74-81, 66-69, and 72 (and/or 73) represent a designer transgenic oxyphotobacterium such as a designer transgenic Thermosynechococcus that comprises the designer genes of a Calvin-cycle 3-phosphoglycerate-branched photosynthetic NADPH-enhanced pathway (numerically labeled as 34, 35, 03, 04, 45-52, 39-42, and 12 in FIG. 4) for photobiological production of 1-butanol from carbon dioxide and water. SEQ ID NOS: 58-69 and 72 (and/or 73) represent another designer transgenic oxyphotobacterium such as designer transgenic Thermosynechococcus that comprises the designer genes of a Calvin-cycle 3-phosphoglycerate-branched photosynthetic NADPH-enhanced pathway (numerically labeled as 34, 35, 03-05, 36-42, and 12 in FIG. 4) for photobiological production of 1-butanol from carbon dioxide and water as well.

[0250] Similarly, SEQ ID NOS: 58-66, 82-84, 69 and 85 represent another designer transgenic oxyphotobacterium such as designer transgenic Thermosynechococcus with a Calvin-cycle 3-phosphoglycerate-branched photosynthetic NADPH-enhanced pathway (numerically labeled as 34, 35, 03-05, 36-39, 53-55, 42 and 56 in FIG. 5) for photobiological production of 2-methyl-1-butanol production from carbon dioxide and water; while SEQ ID NOS: 58-61, 74-84, 69 and 85 represent another designer transgenic Thermosynechococcus with a Calvin-cycle 3-phosphoglycerate-branched photosynthetic NADPH-enhanced 2-methyl-1-butanol production pathway (34, 35, 03, 04, 45-55, 42 and 56 in FIG. 5) for photobiological production of 2-methyl-1-butanol production from carbon dioxide and water.

[0251] SEQ ID NOS: 58-63, 82-84, 69, 70 (or 71) represent another designer transgenic oxyphotobacterium such as designer transgenic Thermosynechococcus with a Calvin-cycle 3-phosphoglycerate-branched photosynthetic NADPH-enhanced isobutanol production pathway (34, 35, 03-05, 53-5, 42, 43 or 44); while SEQ ID NOS: 58-62, 81-83, 65-67, 69 and 86 represent another designer transgenic Thermosynechococcus with a Calvin-cycle 3-phosphoglycerate-branched photosynthetic NADPH-enhanced 3-methyl-1-butanol production pathway (numerical labels 34, 35, 03-05, 53-55, 40, 38, 39, 42, and 57 in FIG. 6).

[0252] SEQ ID NOS: 87-92 represent another designer transgenic Thermosynechococcus with a designer hydrocarbon chain elongation pathway (07′-12′ as shown in FIG. 7) for photobiological production of 1-hexanol. SEQ ID NOS: 87-91 and 93 represent another designer transgenic Thermosynechococcus with a designer hydrocarbon chain elongation pathway (07′-10′ and 07″-12″ as shown in FIG. 7) for photobiological production of 1-octanol.

[0253] SEQ ID NOS: 58-69 and 92 represent another designer transgenic Thermosynechococcus with a designer Calvin-cycle 3-phosphoglycerate-branched photosynthetic NADPH-enhanced pathway (34, 35, 03-05, 36-41, 39, 39′-40′, 39′-42′ and 12′ in FIG. 8) for photobiological production of 1-hexanol from carbon dioxide and water.

[0254] SEQ ID NOS: 58-69, 82-84, and 94 represent a designer transgenic Thermosynechococcus with a designer Calvin-cycle 3-phosphoglycerate-branched photosynthetic NADPH-enhanced pathway (34, 35, 03-05, 36-39, 53-55, 39′-43′, 39′-43′, 39″-43″ in FIG. 9) for production of 3-methyl-1-pentanol, 4-methyl-1-hexanol, and 5-methyl-1-heptanol from carbon dioxide and water. Similarly, SEQ ID NOS: 58-61, 74-81, 82-84, 66-69, and 94 represent another designer transgenic Thermosynechococcus with a Calvin-cycle 3-phosphoglycerate-branched NADPH-enhanced pathway (34, 35, 03, 04, 45-55, 39′-43′, 39′-43′, 39″-43″ in FIG. 9) for photobiological production of 3-methyl-1-pentanol, 4-methyl-1-hexanol, and 5-methyl-1-heptanol from carbon dioxide and water as well.

[0255] SEQ ID NOS: 58-62, 82-84, 65-69 and 94 represent a designer transgenic Thermosynechococcus with a designer Calvin-cycle 3-phosphoglycerate-branched photosynthetic NADPH-enhanced pathway labels (34, 35, 03-05, 53-55, 40, 38, 39, 39′-43′, 39′-43′, and 39″-43″ in FIG. 10) for photobiological production of 4-methyl-1-pentanol, 5-methyl-1-hexanol, and/or 6-methyl-1-heptanol from carbon dioxide and water.

[0256] Use of other host oxyphotobacteria such as Synechococcus sp. strain PCC 7942, Synechocystis sp. strain PCC 6803, Prochlorococcus marinus, Cyanothece sp. ATCC 51142, for genetic transformation with proper designer DNA constructs (genes) can create other designer oxyphotobacteria for photobiological production of butanol and higher alcohols as well. For example, use of Synechococcus sp. strain PCC 7942 as a host organism in genetic transformation with SEQ ID NOS: 95-98 (and/or 99) can create a designer transgenic Synechococcus for photobiological production of 1-butanol. Briefly, SEQ ID NO: 95 presents example 95 of a detailed DNA construct (1438 base pairs (bp)) of a designer NADPH-dependent Glyceraldehyde-3-Phosphate-Dehydrogenase (34) gene that includes a PCR FD primer (sequence by 1-20), a 88-bp nirA promoter (21-108) selected from the Synechococcus sp. strain PCC 7942 (freshwater cyanobacterium) nitrite-reductase-gene promoter sequence, an enzyme-encoding sequence (109-1110) selected and modified from a Staphylococcus NADPH-dependent glyceraldehyde-3-phosphate-dehydrogenase sequence (GenBank accession number: YP_{—}003471459), a 308-bp Synechococcus rbcS terminator (1111-1418), and a PCR RE primer (1419-1438).

[0257] SEQ ID NO: 96 presents example 96 of a detailed DNA construct (1447 bp) of a designer NAD-dependent Glyceraldehyde-3-Phosphate-Dehydrogenase (35) gene that includes a PCR FD primer (sequence by 1-20), a 88-bp nirA promoter (21-108) selected from the Synechococcus nitrite-reductase-gene promoter sequence, an enzyme-encoding sequence (109-1119) selected from a Staphylococcus aureus NAD-dependent glyceraldehyde-3-phosphate-dehydrogenase sequence (GenBank accession number: ADC36961), a 308-bp Synechococcus rbcS terminator (1120-1427), and a PCR RE primer (1428-1447).

[0258] SEQ ID NO: 97 presents example 97 of a detailed DNA construct (2080 bp) of a designer 2-Keto Acid Decarboxylase (42) gene that includes a PCR FD primer (sequence by 1-20), a 88-bp nirA promoter (21-108) selected from the Synechococcus nitrite-reductase-gene promoter sequence, an enzyme-encoding sequence (109-1752) selected from a Lactococcus lactis branched-chain alpha-ketoacid decarboxylase (GenBank accession number: AAS49166), a 308-bp Synechococcus rbcS terminator (1753-2060), and a PCR RE primer (2061-2080).

[0259] SEQ ID NO: 98 presents a detailed DNA construct (1603 bp) of a designer NADH-dependent butanol dehydrogenase (12a) gene that include a PCR FD primer (sequence by 1-20), a 88-bp nirA promoter (21-108) selected from the Synechococcus nitrite-reductase-gene promoter sequence, an enzyme-encoding sequence (109-1275) selected from a Clostridium NADH-dependent butanol dehydrogenase (GenBank accession number: ADO12118), a 308-bp Synechococcus rbcS terminator (1276-1583), and a PCR RE primer (1584-1603).

[0260] SEQ ID NO: 99 presents example 99 of a detailed DNA construct (1654 bp) of a designer NADPH-dependent Butanol Dehydrogenase (12b) gene including: a PCR FD primer (sequence by 1-20), a 88-bp nirA promoter (21-108) selected from the Synechococcus nitrite-reductase-gene promoter sequence, an enzyme-encoding sequence (109-1326) selected from a Butyrivibrio NADPH-dependent butanol dehydrogenase (GenBank: EFF67629), a 308-bp Synechococcus rbcS terminator (1327-1634), and a PCR RE primer (1635-1654).

[0261] Note, in the designer transgenic Synechococcus that is represented by SEQ ID NOS: 95-98 (and/or 99), Synechococcus 's native enzymes of 03-05, 36-41 and 45-52 are used in combination with the designer nirA-promoter-controlled enzymes of 34, 35, 42 and 12 [encoded by SEQ ID NOS: 95-98 (and/or 99)] to confer the Calvin-cycle 3-phosphoglycerate-branched photosynthetic NADPH-enhanced pathways for photobiological production of 1-butanol from carbon dioxide and water (FIG. 4).

[0262] Similarly, use of Synechocystis sp. strain PCC 6803 as a host organism in genetic transformation with SEQ ID NOS: 100-102 (and/or 103) creates a designer transgenic Synechocystis for photobiological production of 1-butanol. Briefly, SEQ ID NO: 100 presents example 100 of a designer nirA-promoter-controlled NAD-dependent Glyceraldehyde-3-Phosphate Dehydrogenase (35) DNA construct (1440 bp) that includes a PCR FD primer (sequence 1-20), a 89-bp Synechocystis sp. strain PCC 6803 nitrite-reductase nirA promoter (21-109), an enzyme-encoding sequence (110-1011) selected from a Streptococcus pyogenes NAD-dependent Glyceraldehyde-3-phosphate dehydrogenase (GenBank: YP_{—}002285269), a 409-bp Synechocystis sp. PCC 6803 rbcS terminator (1012-1420), and a PCR RE primer (1421-1440).

[0263] SEQ ID NO: 101 presents example 101 of a designer nirA-promoter-controlled 2-Keto Acid Decarboxylase (42) DNA construct (2182 bp) that includes a PCR FD primer (sequence 1-20), a 89-bp Synechocystis sp. strain PCC 6803 nitrite-reductase nirA promoter (21-109), an enzyme-encoding sequence (110-1753) selected from a Lactococcus lactis branched-chain alpha-ketoacid decarboxylase (GenBank: AAS49166), a 409-bp Synechocystis sp. PCC 6803 rbcS terminator (1754-2162), and a PCR RE primer (2163-2182).

[0264] SEQ ID NO: 102 presents example 102 of a designer nirA-promoter-controlled NADH-dependent Butanol Dehydrogenase (12a) DNA construct (1705 bp) that includes a PCR FD primer (sequence 1-20), a 89-bp Synechocystis sp. strain PCC 6803 nitrite-reductase nirA promoter (21-109), an enzyme-encoding sequence (110-1276) selected from a Clostridium carboxidivorans P7 NADH-dependent butanol dehydrogenase (GenBank: ADO12118), a 409-bp Synechocystis sp. PCC 6803 rbcS terminator (1277-1685), and a PCR RE primer (1686-1705).

[0265] SEQ ID NO: 103 presents example 103 of a designer nirA-promoter-controlled NADPH-dependent butanol dehydrogenase (12b) DNA construct (1756 bp) that includes a PCR FD primer (sequence 1-20), a 89-bp Synechocystis sp. strain PCC 6803 nitrite- reductase nirA promoter (21-109), an enzyme-encoding sequence (110-1327) selected from a Butyrivibrio crossotus NADPH-dependent butanol dehydrogenase (GenBank: EFF67629), a 409-bp Synechocystis sp. PCC 6803 rbcS terminator (1328-1736), and a PCR RE primer (1737-1756).

[0266] Note, in the designer transgenic Synechocystis that contains the designer genes of SEQ ID NOS: 100-102 (and/or 103), Synechocystis's native enzymes of 34, 03-05, 36-41 and 45-52 are used in conjunction with the designer nirA-promoter-controlled enzymes of 35, 42 and 12 [encoded by SEQ ID NOS: 100-102 (and/or 103)] to confer the Calvin-cycle 3-phosphoglycerate-branched photosynthetic NADPH-enhanced pathways for photobiological production of 1-butanol from carbon dioxide and water (FIG. 4).

[0267] Use of Nostoc sp. strain PCC 7120 as a host organism in genetic transformation with SEQ ID NOS: 104-109 can create a designer transgenic Nostoc for photobiological production of 2-methyl-1-butanol (FIG. 5). Briefly, SEQ ID NO: 104 presents example 104 of a designer hox-promoter-controlled NAD-dependent Glyceraldehyde-3-Phosphate Dehydrogenase (35) DNA construct (1655 bp) that includes a PCR FD primer (sequence 1-20), a 172-bp Nostoc sp. strain PCC 7120 (Anabaena PCC 7120) hox promoter (21-192), an enzyme-encoding sequence (193-1203) selected/modified from the sequence of a Streptococcus pyogenes NZ131 NAD-dependent glyceraldehyde-3-phosphate dehydrogenase (GenBank: YP_{—}002285269), a 432-bp Nostoc sp. strain PCC 7120 gor terminator (1204-1635), and a PCR RE primer (1636-1655).

[0268] SEQ ID NO: 105 presents example 105 of a designer hox-promoter-controlled Acetolactate Synthase (53) DNA construct (2303 bp) that includes a PCR FD primer (sequence 1-20), a 172-bp Nostoc sp. strain PCC 7120 (Anabaena PCC 7120) hox promoter (21-192), an enzyme-encoding sequence (193-1851) selected/modified from the sequence of a Thermosynechococcus elongatus BP-1 acetolactate synthase (GenBank: NP_{—}682614), a 432-bp Nostoc sp. strain PCC 7120 gor terminator (1852-2283), and a PCR RE primer (2284-2303).

[0269] SEQ ID NO: 106 presents example 106 of a designer hox-promoter-controlled Ketol-Acid Reductoisomerase (54) DNA construct (1661 bp) that includes a PCR FD primer (sequence 1-20), a 172-bp Nostoc sp. strain PCC 7120 (Anabaena PCC 7120) hox promoter (21-192), an enzyme-encoding sequence (193-1209) selected/modified from the sequence of a Calditerrivibrio nitroreducens ketol-acid reductoisomerase (GenBank: YP_{—}004050904), a 432-bp Nostoc sp. gor terminator (1210-1641), and a PCR RE primer (1642-1661).

[0270] SEQ ID NO: 107 presents example 107 of a designer hox-promoter-controlled Dihydroxy-Acid Dehydratase (55) DNA construct (2324 bp) that includes a PCR FD primer (sequence 1-20), a 172-bp Nostoc sp. strain PCC 7120 (Anabaena PCC 7120) hox promoter (21-192), an enzyme-encoding sequence (193-1872) selected/modified from the sequence of a Marivirga tractuosa DSM 4126 dihydroxy-acid dehydratase (GenBank: YP_{—}004053736), a 432-bp Nostoc sp. gor terminator (1873-2304), and a PCR RE primer (2305-2324).

[0271] SEQ ID NO: 108 presents example 108 of a designer hox-promoter-controlled branched-chain alpha-Ketoacid Decarboxylase (42) DNA construct (2288 bp) that includes a PCR FD primer (sequence 1-20), a 172-bp Nostoc sp. (Anabaena PCC 7120) hox promoter (21-192), an enzyme-encoding sequence (193-1836) selected/modified from the sequence of a Lactococcus lactis branched-chain alpha-ketoacid decarboxylase (GenBank: AAS49166), a 432-bp Nostoc sp. gor terminator (1837-2268), and a PCR RE primer (2269-2288).

[0272] SEQ ID NO: 109 presents example 109 of a designer hox-promoter-controlled 2-Methylbutyraldehyde Reductase (56) DNA construct (1613 bp) that includes a PCR FD primer (sequence 1-20), a 172-bp Nostoc sp. (Anabaena PCC 7120) hox promoter (21-192), an enzyme-encoding sequence (193-1461) selected/modified from the sequence of a Schizosaccharomyces japonicus y 2-methylbutyraldehyde reductase (GenBank: XP_{—}002173231), a 432-bp Nostoc sp. strain PCC 7120 gor terminator (1462-1893), and a PCR RE primer (1894-1613).

[0273] Note, in the designer transgenic Nostoc that contains designer hox-promoter-controlled genes of SEQ ID NOS: 104-109, Nostoc's native enzymes (genes) of 34, 03-05, 36-39 and 45-52 are used in combination with the designer hox-promoter-controlled enzymes of 35, 53-55, 42 and 56 (encoded by DNA constructs of SEQ ID NOS: 104-109) to confer the Calvin-cycle 3-phosphoglycerate-branched photosynthetic NADPH-enhanced pathways for photobiological production of 2-methyl-1-butanol from carbon dioxide and water (FIG. 5).

[0274] Use of Prochlorococcus marinus MIT 9313 as a host organism in genetic transformation with SEQ ID NOS: 110-122 can create a designer transgenic Prochlorococcus marinus for photobiological production of isobutanol and/or 3-methyl-1-butanol (FIG. 6). Briefly, SEQ ID NO:110 presents example 110 for a designer groE-promoter-controlled NAD-dependent Glyceraldehyde-3-Phosphate Dehydrogenase (35) DNA construct (1300 bp) that includes a PCR FD primer (sequence 1-20), a 137-bp Prochlorococcus marinus MIT 9313 heat- and light-responsive groE promoter (21-157), an enzyme-encoding sequence (158-1159) selected from a Vibrio cholerae MJ-1236 NAD-dependent Glyceraldehyde-3-phosphate dehydrogenase (GenBank: ACQ61431), a 121-bp Prochlorococcus marinus MIT9313 rbcS terminator (1160-1280), and a PCR RE primer (1281-1300).

[0275] SEQ ID NO:111 presents example 111 for a designer groE-promoter-controlled Phosphoglycerate Mutase (03) DNA construct (1498 bp) that includes a PCR FD primer (sequence 1-20), a 137-bp Prochlorococcus marinus MIT9313 heat- and light-responsive groE promoter (21-157), an enzyme-encoding sequence (158-1357) selected from a Pelotomaculum thermopropionicum SI phosphoglycerate mutase (GenBank: YP_{—}001212148), a 121-bp Prochlorococcus marinus rbcS terminator (1358-1478), and a PCR RE primer (1479-1498).

[0276] SEQ ID NO:112 presents example 112 for a designer groE-promoter-controlled Enolase (04) DNA construct (1588 bp) that includes a PCR FD primer (sequence 1-20), a 137-bp Prochlorococcus heat- and light-responsive groE promoter (21-157), an enzyme-encoding sequence (158-1447) selected from a Thermotoga enolase (GenBank: ABQ46079), a 121-bp Prochlorococcus marinus rbcS terminator (1448-1568), and a PCR RE primer (1569-1588).

[0277] SEQ ID NO:113 presents example 113 for a designer groE-promoter-controlled Pyruvate Kinase (05) DNA construct (1717 bp) that includes a PCR FD primer (sequence 1-20), a 137-bp Prochlorococcus marinus MIT9313 heat- and light-responsive groE promoter (21-157), an enzyme-encoding sequence (158-1576) selected from a Thermotoga lettingae TMO pyruvate kinase (GenBank: YP_{—}001471580), a 121-bp Prochlorococcus marinus MIT9313 rbcS terminator (1577-1697), and a PCR RE primer (1698-1717).

[0278] SEQ ID NO:114 presents example 114 for a designer groE-promoter-controlled Acetolactate Synthase (53) DNA construct (2017 bp) that includes a PCR FD primer (sequence 1-20), a 137-bp Prochlorococcus marinus MIT 9313 heat- and light-responsive groE promoter (21-157), an enzyme-encoding sequence (158-1876) selected from a Bacillus licheniformis ATCC 14580 acetolactate synthase (GenBank: AAU42663), a 121-bp Prochlorococcus marinus MIT 9313 rbcS terminator (1877-1997), and a PCR RE primer (1998-2017).

[0279] SEQ ID NO:115 presents example 115 for a designer groE-promoter-controlled Ketol-Acid Reductoisomerase (54) DNA construct (1588 bp) that includes a PCR FD primer (sequence 1-20), a 137-bp Prochlorococcus marinus MIT9313 heat- and light-responsive groE promoter (21-157), an enzyme-encoding sequence (158-1168) selected from a Thermotoga petrophila RKU-1 ketol-acid reductoisomerase (GenBank: ABQ46398), a 400-bp Prochlorococcus marinus MIT9313 rbcS terminator (1169-1568), and a PCR RE primer (1569-1588).

[0280] SEQ ID NO:116 presents example 116 for a designer groE-promoter-controlled Dihydroxy-Acid Dehydratase (55) DNA construct (1960 bp) that includes a PCR FD primer (sequence 1-20), a 137-bp Prochlorococcus marinus heat- and light-responsive groE promoter (21-157), an enzyme-encoding sequence (158-1819) selected from a Syntrophothermus lipocalidus DSM 12680 dihydroxy-acid dehydratase (GenBank: ADI02905), a 121-bp Prochlorococcus marinus rbcS terminator (1820-1940), and a PCR RE primer (1941-1960).

[0281] SEQ ID NO:117 presents example 117 for a designer groE-promoter-controlled 2-Keto Acid Decarboxylase (42) DNA construct (1945 bp) that includes a PCR FD primer (sequence 1-20), a 137-bp Prochlorococcus heat- and light-responsive groE promoter (21-157), an enzyme-encoding sequence (158-1804) selected from a Lactococcus lactis Alpha-ketoisovalerate decarboxylase (GenBank: ADA65057), a 121-bp Prochlorococcus rbcS terminator (1805-1925), and a PCR RE primer (1926-1945).

[0282] SEQ ID NO:118 presents example 118 for a designer nirA-promoter-controlled Alcohol Dehydrogenase (43/44) DNA construct (1138 bp) that includes a PCR FD primer (sequence 1-20), a 251-bp Prochlorococcus nirA promoter (21-271), an enzyme-encoding sequence (272-997) selected from a Geobacillus short chain alcohol dehydrogenase (GenBank: YP_{—}146837), a 121-bp Prochlorococcus rbcS terminator (998-1118), and a PCR RE primer (1119-1138).

[0283] Note, in the designer transgenic Prochlorococcus that contains the designer genes of SEQ ID NOS: 110-118, Prochlorococcus's native gene (enzyme) of 34 is used in combination with the designer groE and nirA-promoters-controlled genes (enzymes) of 35, 03-05, 53-55, 42 and 43/44 (encoded by DNA constructs of SEQ ID NOS: 110-118) to confer the Calvin-cycle 3-phosphoglycerate-branched photosynthetic NADPH-enhanced pathways for photobiological production of isobutanol from carbon dioxide and water (FIG. 6). Addition of the following four designer groE promoter-controlled genes (SEQ ID NO:119-122) results in another designer transgenic Prochlorococcus that can produce both isobutanol and 3-methyl-1-butanol from carbon dioxide and water (35, 03-05, 53-55, 42, 43/44, plus 38-40 and 57 as shown in FIG. 6).

[0284] Briefly, SEQ ID NO:119 presents example 119 for a designer groE-promoter-controlled 2-Isopropylmalate Synthase (40) DNA construct (1816 bp) that includes a PCR FD primer (sequence 1-20), a 137-bp Prochlorococcus marinus MIT9313 heat- and light-responsive groE promoter (21-157), an enzyme-encoding sequence (158-1675) selected from a Pelotomaculum thermopropionicum SI 2-isopropylmalate synthase (GenBank: YP_{—}001211081), a 121-bp Prochlorococcus marinus rbcS terminator (1676-1796), and a PCR RE primer (1797-1816).

[0285] SEQ ID NO:120 presents example 120 for a designer groE-promoter-controlled 3-Isopropylmalate Dehydratase (38) DNA construct (2199 bp) that includes a PCR FD primer (sequence 1-20), a 137-bp Prochlorococcus marinus MIT9313 heat- and light-responsive groE promoter (21-157), a 3-isopropylmalate dehydratase large subunit-encoding sequence (158-1420) selected from a Pelotomaculum thermopropionicum SI 3-isopropylmalate dehydratase large subunit (GenBank: YP_{—}001211082), a 137-bp Prochlorococcus marinus MIT9313 heat- and light-responsive groE promoter (1421-1557), a 3-isopropylmalate dehydratase small subunit-encoding sequence (1558-2058) selected from a Pelotomaculum thermopropionicum SI 3-isopropylmalate dehydratase small subunit (GenBank: YP_{—}001211083), a 121-bp Prochlorococcus marinus rbcS terminator (2059-2179), and a PCR RE primer (2180-2199).

[0286] SEQ ID NO:121 presents example 121 for a designer groE-promoter-controlled 3-Isopropylmalate Dehydrogenase (39) DNA construct (1378 bp) that includes a PCR FD primer (sequence 1-20), a 137-bp Prochlorococcus marinus MIT9313 heat- and light-responsive groE promoter (21-157), an enzyme-encoding sequence (158-1237) selected from a Syntrophothermus lipocalidus DSM 12680 3-isopropylmalate dehydrogenase (GenBank: ADIO2898), a 121-bp Prochlorococcus marinus rbcS terminator (1238-1358), and a PCR RE primer (1359-1378).

[0287] SEQ ID NO:122 presents example 122 for a designer groE-promoter-controlled 3-Methylbutanal Reductase (57) DNA construct (1327 bp) that includes a PCR FD primer (sequence 1-20), a 137-bp Prochlorococcus marinus MIT9313 heat- and light-responsive groE promoter (21-157), an enzyme-encoding sequence (158-1186) selected from a Saccharomyces cerevisiae S288c 3-Methylbutanal reductase (GenBank: DAA10635), a 121-bp Prochlorococcus marinus MIT9313 rbcS terminator (1187-1307), and a PCR RE primer (1308-1327).

[0288] Note, the use of SEQ ID NOS: 110-117 and 119-122 in genetic transformation of Prochlorococcus marinus MIT 9313 creates another designer transgenic Prochlorococcus marinus with a groE promoter-controlled designer Calvin-cycle-channeled pathway (identified as 34 (native), 35, 03-05, 53-55, 38-40, 42 and 57 in FIG. 6) for photobiological production of 3-methyl-1-butanol from carbon dioxide and water.

[0289] Use of Cyanothece sp. ATCC 51142 as a host organism in genetic transformation with SEQ ID NOS: 123-128 can create a designer transgenic Cyanothece for photobiological production of 1-pentanol, 1-hexanol, and/or 1-heptanol (FIG. 8). Briefly, SEQ ID NO:123 presents example 123 for a designer nirA-promoter-controlled 2-Isopropylmalate Synthase (40) DNA construct (2004 bp) that includes a PCR FD primer (sequence 1-20), a 203-bp Cyanothece sp. nirA promoter (21-223), an enzyme-encoding sequence (224-1783) selected from a Hydrogenobacter thermophilus 2-isopropylmalate synthase sequence (GenBank: BAI69273), a 201-bp Cyanothece sp. rbcS terminator (1784-1984), and a PCR RE primer (1985-2004).

[0290] SEQ ID NO:124 presents example 124 for a designer nirA-promoter-controlled Isopropylmalate Isomerase (41) large/small subunits DNA construct (2648 bp) that includes a PCR FD primer (sequence 1-20), a 203-bp Cyanothece sp. ATCC 51142 nirA promoter (21-223), an enzyme-large-subunit-encoding sequence (224-1639) selected from a Anoxybacillus flavithermus WK1 isopropylmalate isomerase large subunit sequence (GenBank: YP_{—}002314962), a 203-bp Cyanothece sp. ATCC 51142 nirA promoter (1640-1842), an enzyme-small-subunit-encoding sequence (1843-2427) selected from a Anoxybacillus flavithermus WK1 isopropylmalate isomerase small subunit sequence (GenBank: YP_{—}002314963), a 201-bp Cyanothece sp. ATCC 51142 rbcS terminator (2428-1628), and a PCR RE primer (2629-2648).

[0291] SEQ ID NO:125 presents example 125 for a designer g nirA-promoter-controlled 3-Isopropylmalate Dehydrogenase (39) DNA construct (1530 bp) that includes a PCR FD primer (sequence 1-20), a 203-bp Cyanothece sp. ATCC 51142 nirA promoter (21-223), an enzyme-encoding sequence (224-1309) selected from a Thermosynechococcus elongatus BP-1 3-isopropylmalate dehydrogenase sequence (GenBank: BAC09152), a 201-bp Cyanothece sp. ATCC 51142 rbcS terminator (1310-1310), and a PCR RE primer (1311-1530).

[0292] SEQ ID NO:126 presents example 126 for a designer nirA-promoter-controlled 2-Keto Acid Decarboxylase (42′) DNA construct (2088 bp) that includes a PCR FD primer (sequence 1-20), a 203-bp Cyanothece nirA promoter (21-223), an enzyme-encoding sequence (224-1867) selected from a Lactococcus lactis 2-keto acid decarboxylase (GenBank: AAS49166), a 201-bp Cyanothece rbcS terminator (1868-2068), and a PCR RE primer (2069-2088).

[0293] SEQ ID NO:127 presents example 127 for a designer nirA-promoter-controlled Hexanol Dehydrogenase (12′) DNA construct (1503 bp) that includes a PCR FD primer (sequence 1-20), a 203-bp Cyanothece nirA promoter (21-223), an enzyme-encoding sequence (224-1282) selected from a Mycobacterium chubuense hexanol dehydrogenase (GenBank: ACZ56328), a 201-bp Cyanothece rbcS terminator (1283-1483), and a PCR RE primer (1484-1503).

[0294] SEQ ID NO:128 presents example 128 for a designer nirA-promoter-controlled short-chain Alcohol Dehydrogenase (43′, 43″) DNA construct (1149 bp) that includes a PCR FD primer (sequence 1-20), a 203-bp Cyanothece sp. ATCC 51142 nirA promoter (21-223), an enzyme-encoding sequence (224-928) selected from a Pyrococcus furiosus DSM 3638 Short chain alcohol dehydrogenase (GenBank: AAC25556), a 201-bp Cyanothece sp. ATCC 51142 rbcS terminator (929-1129), and a PCR RE primer (1130-1149).

[0295] Note, in the designer transgenic Cyanothece that contains designer nirA promoter-controlled genes of SEQ ID NOS: 123-127, Cyanothece's native enzymes of 34, 03-05, 36-38, and 45-52 are used in combination with the designer nirA-promoters-controlled enzymes of 35, 39-41 (39′-41′, 39′-41′), 42′ and 12′ (encoded by DNA constructs of SEQ ID NOS: 123-127) to confer the Calvin-cycle 3-phosphoglycerate-branched photosynthetic NADPH-enhanced pathways for photobiological production of 1-hexanol from carbon dioxide and water (FIG. 8). Addition of a designer nirA-promoters-controlled gene (SEQ ID NO: 128) of a short chain alcohol dehydrogenase 43′ (43″) with promiscuity results in another designer transgenic Cyanothece containing a Calvin-cycle-channeled pathway (35, 39-41, 39′-43′, 39′-43′, and 39″-43″ as shown in FIG. 8) that can produce 1-pentanol, 1-hexanol, and 1-hexanol from carbon dioxide and water.

Designer Advanced Photosynthetic Organisms with Calvin-Cycle-Channeled Pathways for Production of Butanol and Related Higher Alcohols

[0296] According to one of the various embodiments, use of certain designer DNA constructs in genetic transformation of eukaryotic photosynthetic organisms such as plant cells, eukaryotic aquatic plants (including, for example, eukaryotic algae, submersed aquatic herbs, duckweeds, water cabbage, water lily, water hyacinth, Bolbitis heudelotii, Cabomba sp., and seagrasses) can create designer transgenic eukaryotic photosynthetic organisms for production of butanol and related higher alcohols from carbon dioxide and water. Eukaryotic algae that can be selected for use as host organisms to create designer algae for photobiological production of butanol and related higher alcohols include (but not limited to): Dunaliella salina, Dunaliella viridis, Dunaliella bardowil, Crypthecodinium cohnii, Schizochytrium sp., Chlamydomonas reinhardtii, Platymonas subcordiformis, Chlorella fusca, Chlorella sorokiniana, Chlorella vulgaris, ‘Chlorella’ ellipsoidea, Chlorella spp., Haematococcus pluvialis; Parachlorella kessleri, Betaphycus gelatinurn, Chondrus crispus, Cyanidioschyzon merolae, Cyanidium caldarium, Galdieria sulphuraria, Gelidiella acerosa, Gracilaria changii, Kappaphycus alvarezii, Porphyra miniata, Ostreococcus tauri, Porphyra yezoensis, Porphyridium sp., Palmaria palmata, Gracilaria spp., Isochrysis galbana, Kappaphycus spp., Laminaria japonica, Laminaria spp., Monostroma spp., Nannochloropsis oculata, Porphyra spp., Porphyridium spp., Undaria pinnatifida, Ulva lactuca, Ulva spp., Undaria spp., Phaeodactylum Tricornutum, Navicula saprophila, Cylindrotheca fusiformis, Cyclotella cryptica, Euglena gracilis, Amphidinium sp., Symbiodinium microadriaticum, Macrocystis pyrifera, Ankistrodesmus braunii, Scenedesmus obliquus, Stichococcus sp., Platymonas sp., Dunalielki sauna, and Stephanoptera gracilis.

[0297] According to another embodiment, the transgenic photosynthetic organism comprises a designer transgenic plant or plant cells selected from the group consisting of aquatic plants, plant cells, green algae, red algae, brown algae, blue-green algae (oxyphotobacteria including cyanobacteria and oxychlorobacteria), diatoms, marine algae, freshwater algae, salt-tolerant algal strains, cold-tolerant algal strains, heat-tolerant algal strains, antenna-pigment-deficient mutants, butanol-tolerant algal strains, higher-alcohols-tolerant algal strains, butanol-tolerant oxyphotobacteria, higher-alcohols-tolerant oxyphotobacteria, and combinations thereof

[0298] According to another embodiment, said transgenic photosynthetic organism comprises a biosafety-guarded feature selected from the group consisting of: a designer proton-channel gene inducible under pre-determined inducing conditions, a designer cell-division-cycle iRNA gene inducible under pre-determined inducing conditions, a high-CO₂-requiring mutant as a host organism for transformation with designer biofuel-production-pathway genes in creating designer cell-division-controllable photosynthetic organisms, and combinations thereof

[0299] The greater complexity and compartmentalization of eukaryotic plant cells allow for creation of a wider range of photobiologically active designer organisms and novel metabolic pathways compartmentally segregated for production of butanol and/or higher alcohols from water and carbon dioxide. In a eukaryotic algal cell, for example, the translation of designer nuclear genes occurs in cytosol whereas the photosynthesis/Calvin cycle is located inside an algal chloroplast. This clear separation of algal chloroplast photosynthesis from other subcellular functions such as the functions of cytoplasm membrane, cytosol and mitochondria can be used as an advantage in creation of a biosafety-guarded designer algae through an inducible insertion of designer proton-channels into cytoplasm membrane to permanently disable any cell division and/or mating capability while keeping the algal chloroplast functional work with the designer biofuel production, pathways to produce butanol and related higher alcohols. However, it is essential to genetically deliver designer enzyme(s) into the chloroplast to tame the Calvin cycle and funnel metabolism toward butanol directly from CO₂ and H₂O. This requires more complicated gene design to achieve desirable results.

[0300] According to one of various embodiments, designer Calvin-cycle-channeled pathway enzymes encoded with designer unclear genes are targetedly expressed into algal chloroplast through use of a transit signal peptide sequence. The said signal peptide is selected from the group consisting of the hydrogenase transit-peptide sequences (HydA1 and HydA2), ferredoxin transit-peptide sequence (Frx1), thioredoxin-m transit-peptide sequence (Trx2), glutamine synthase transit-peptide sequence (Gs2), LhcII transit-peptide sequences, PSII-T transit-peptide sequence (PsbT), PSII-S transit-peptide sequence (PsbS), PSII-W transit-peptide sequence (PsbW), CF₀CF₁ subunit-γ transit-peptide sequence (AtpC), CF₀CF₁ subunit-δ transit-peptide sequence (AtpD), CFoCF₁ subunit-II transit-peptide sequence (AtpG), photosystem I (PSI) transit-peptide sequences, Rubisco SSU transit-peptide sequences, and combinations thereof. Preferred transit peptide sequences include the Hyd1 transit peptide, the Frx1 transit peptide, and the Rubisco SSU transit peptides (such as RbcS2).

[0301] SEQ ID NOS. 129-165 present examples for designer DNA constructs of designer chloroplast-targeted enzymes for creation of designer eukaryotic photosynthetic organisms such as designer algae with Calvin-cycle-channeled photosynthetic NADPH-enhanced pathways for photobiological production of butanol and related higher alcohols. Briefly, SEQ ID NO. 129 presents example 129 for a designer Nia1-promoter-controlled chloroplast-targeted Phosphoglycerate Mutase (03) DNA construct (1910 bp) that includes a PCR FD primer (sequence 1-20), a 2×84-bp Chlamydomonas Nia1 (nitrate reductase) promoter (21-188), a 135-bp Chlamydomonas RbcS2 transit peptide (189-323), a Phosphoglycerate Mutase-encoding sequence (324-1667) selected from Nostoc azollae Phosphoglycerate Mutase (ADI65627), a 223-bp Chlamydomonas RbcS2 terminator (1668-1890), and a PCR RE primer (1891-1910).

[0302] SEQ ID NO. 130 presents example 130 for a designer Nia1-promoter-controlled chloroplast-targeted Enolase (04) DNA construct (1856 bp) that includes a PCR FD primer (sequence 1-20), a 2×84-bp Chlamydomonas reinhardtii Nia1 promoter (21-188), a 135-bp Chlamydomonas reinhardtii RbcS2 transit peptide (189-323), an Enolase-encoding sequence (324-1613) selected/modified from Nostoc azollae Enolase (ADI63801), a 223-bp Chlamydomonas RbcS2 terminator (1614-1836), and a PCR RE primer (18837-1856).

[0303] SEQ ID NO. 131 presents example 131 for a designer Nia1-promoter-controlled chloroplast-targeted Pyruvate-Kinase (05) DNA construct (1985 bp) that includes a PCR FD primer (sequence 1-20), a 2×84-bp Chlamydomonas reinhardtii Nia1 promoter (21-188), a 135-bp Chlamydomonas reinhardtii RbcS2 transit peptide (189-323), an enzyme-encoding sequence (324-1742) selected/modified from Cyanothece sp. PCC 8802 pyruvate-kinase (YP_{—}003138017), a 223-bp Chlamydomonas RbcS2 terminator (1743-1965), and a PCR RE primer (1966-1985).

[0304] SEQ ID NO. 132 presents example 132 for a designer Nia1-promoter-controlled chloroplast-targeted NADPH-dependent Glyceraldehyde-3-Phosphate Dehydrogenase (34) DNA construct (1568 bp) that includes a PCR FD primer (sequence 1-20), a 2×84-bp Chlamydomonas reinhardtii Nia1 promoter (21-188), a 135-bp Chlamydomonas RbcS2 transit peptide (189-323), a NADPH-dependent Glyceraldehyde-3-phosphate dehydrogenase-encoding sequence (324-1325) selected/modified from Staphylococcus lugdunensis NADPH-dependent glyceraldehyde-3-phosphate dehydrogenase (ADC87332), a 223-bp Chlamydomonas RbcS2 terminator (1326-1548), and a PCR RE primer (1549-1568).

[0305] SEQ ID NO. 133 presents example 133 for a designer Nia1-promoter-controlled chloroplast-targeted NAD-dependent Glyceraldehyde-3-phosphate dehydrogenase (35) DNA construct (1571 bp) that includes a PCR FD primer (sequence 1-20), a 2×84-bp Chlamydomonas Nia1 (nitrate reductase) promoter (21-188), a 135-bp Chlamydomonas RbcS2 transit peptide (189-323), a NAD-dependent Glyceraldehyde-3-phosphate dehydrogenase-encoding sequence (324-1328) selected/modified from Flavobacteriaceae bacterium NAD-dependent Glyceraldehyde-3-phosphate dehydrogenase (YP_{—}003095198), a 223-bp Chlamydomonas RbcS2 terminator (1329-1551), and a PCR RE primer (1552-1571).

[0306] SEQ ID NO. 134 presents example 134 for a designer Nia1-promoter-controlled chloroplast-targeted Citramalate Synthase (36) DNA construct (2150 bp) that includes a PCR FD primer (sequence 1-20), a 2×84-bp Chlamydomonas Nia1 (nitrate reductase) promoter (21-188), a 135-bp Chlamydomonas RbcS2 transit peptide (189-323), a Citramalate Synthase-encoding sequence (324-1907) selected from Hydrogenobacter Citramalate Synthase (ADO45737), a 223-bp Chlamydomonas RbcS2 terminator (1908-2130), and a PCR RE primer (2131-2150).

[0307] SEQ ID NO. 135 presents example 135 for a designer Nia1-promoter-controlled chloroplast-targeted 3-Isopropylmalate/(R)-2-Methylmalate Dehydratase (37) large/small subunits DNA construct (3125 bp) that includes a PCR FD primer (sequence 1-20), a 2×84-bp Chlamydomonas reinhardtii Nia1 promoter (21-188), a 135-bp Chlamydomonas RbcS2 transit peptide (189-323), a 3-isopropylmalate/(R)-2-methylmalate dehydratase large subunit-encoding sequence (324-2084) selected/modified from Eubacterium eligens 3-isopropylmalate/(R)-2-methylmalate dehydratase large subunit (YP_{—}002930810), a 2×84-bp Chlamydomonas Nia1 promoter (2085-2252), a 135-bp Chlamydomonas RbcS2 transit peptide (2253-2387), a 3-isopropylmalate/(R)-2-methylmalate dehydratase small subunit-encoding sequence (2388-2882) selected/modified from Eubacterium eligens 3-isopropylmalate/(R)-2-methylmalate dehydratase small subunit (YP_{—}002930809), a 223-bp Chlamydomonas RbcS2 terminator (2883-3105), and a PCR RE primer (3106-3125).

[0308] SEQ ID NO. 136 presents example 136 for a designer Nia1-promoter-controlled chloroplast-targeted 3-Isopropylmalate Dehydratase (38) large/small subunits DNA construct (2879 bp) that includes a PCR FD primer (sequence 1-20), a 2×84-bp Chlamydomonas Nia1 promoter (21-188), a 135-bp Chlamydomonas RbcS2 transit peptide (189-323), a 3-isopropylmalate dehydratase large subunit-encoding sequence (324-1727) selected/modified from Cyanothece 3-isopropylmalate dehydratase large subunit (YP_{—}003886427), a 2×84-bp Chlamydomonas Nia1 promoter (1727-1894), a 135-bp Chlamydomonas RbcS2 transit peptide (1895-2029), a 3-isopropylmalate dehydratase small subunit-encoding sequence (2030-2636) selected from Cyanothece 3-isopropylmalate dehydratase small subunit (YP_{—}003889452), a 223-bp Chlamydomonas r RbcS2 terminator (2637-2859), and a PCR RE primer (2860-2879).

[0309] SEQ ID NO. 137 presents example 137 for a designer Nia1-promoter-controlled chloroplast-targeted 3-Isopropylmalate Dehydrogenase (39) DNA construct (1661 bp) that includes a PCR FD primer (sequence 1-20), a 2×84-bp Chlamydomonas Nia1 (nitrate reductase) promoter (21-188), a 135-bp Chlamydomonas RbcS2 transit peptide (189-323), a 3-isopropylmalate dehydrogenase-encoding sequence (324-1418) selected/modified from Cyanothece 3-isopropylmalate dehydrogenase (YP_{—}003888480), a 223-bp Chlamydomonas RbcS2 terminator (1419-1641), and a PCR RE primer (1642-1661).

[0310] SEQ ID NO. 138 presents example 138 for a designer Nia1-promoter-controlled chloroplast-targeted 2-Isopropylmalate Synthase (40) DNA construct (2174 bp) that includes a PCR FD primer (sequence 1-20), a 2×84-bp Chlamydomonas Nia1 promoter (21-188), a 135-bp Chlamydomonas RbcS2 transit peptide (189-323), a 2-isopropylmalate synthase-encoding sequence (324-1931) selected/modified from Cyanothece 2-isopropylmalate synthase (YP_{—}003890122), a 223-bp Chlamydomonas RbcS2 terminator (1932-2154), and a PCR RE primer (2155-2174).

[0311] SEQ ID NO. 139 presents example 139 for a designer Nia1-promoter-controlled chloroplast-targeted Isopropylmalate Isomerase (41) large/small subunit DNA construct (2882 bp) that includes a PCR FD primer (sequence 1-20), a 2×84-bp Chlamydomonas Nia1 promoter (21-188), a 135-bp Chlamydomonas RbcS2 transit peptide (189-323), an isopropylmalate isomerase large subunit-encoding sequence (324-1727) selected/modified from Anabaena variabilis isopropylmalate isomerase large subunit (YP_{—}324467), a 2×84-bp Chlamydomonas reinhardtii Nia1 promoter (1728-1895), a 135-bp Chlamydomonas RbcS2 transit peptide (1896-2030), an isopropylmalate isomerase small subunit-encoding sequence (2031-2639) selected/modified from Anabaena isopropylmalate isomerase small subunit (YP_{—}324466), a 223-bp Chlamydomonas RbcS2 terminator (2640-2862), and a PCR RE primer (2863-2882).

[0312] SEQ ID NO. 140 presents example 140 for a designer Nia1-promoter-controlled chloroplast-targeted 2-Keto Acid Decarboxylase (42) DNA construct (2210 bp) that includes a PCR FD primer (1-20), a 2×84-bp Chlamydomonas Nia1 promoter (21-188), a 135-bp Chlamydomonas RbcS2 transit peptide (189-323), a 2-keto acid decarboxylase-encoding sequence (324-1967) selected from Lactococcus 2-keto acid decarboxylase (AAS49166), a 223-bp Chlamydomonas RbcS2 terminator (1968-2190), and a PCR RE primer (2191-2210).

[0313] SEQ ID NO. 141 presents example 141 for a designer Nia1-promoter-controlled chloroplast-targeted NADH-dependent Alcohol Dehydrogenase (43) DNA construct (1724 bp) that includes a PCR FD primer (sequence 1-20), a 2×84-bp Chlamydomonas Nia1 promoter (21-188), a 135-bp Chlamydomonas RbcS2 transit peptide (189-323), a NADH-dependent alcohol dehydrogenase-encoding sequence (324-1481) selected/modified from Gluconacetobacter hansenii NADH-dependent alcohol dehydrogenase (ZP_{—}06834544), a 223-bp Chlamydomonas RbcS2 terminator (1482-1704), and a PCR RE primer (1705-1724).

[0314] SEQ ID NO. 142 presents example 142 for a designer Nia1-promoter-controlled chloroplast-targeted NADPH-dependent Alcohol Dehydrogenase (44) DNA construct (1676 bp) that includes a PCR FD primer (sequence 1-20), a 2×84-bp Chlamydomonas reinhardtii Nia1 promoter (21-188), a 135-bp Chlamydomonas reinhardtii RbcS2 transit peptide (189-323), a NADPH-dependent alcohol dehydrogenase-encoding sequence (324-1433) selected/modified from Fusobacterium NADPH-dependent alcohol dehydrogenase (ZP_{—}04573952), a 223-bp Chlamydomonas reinhardtii RbcS2 terminator (1434-1656), and a PCR RE primer (1657-1676).

[0315] Note, use of SEQ ID NOS. 129-141 (and/or 142) in genetic transformation of an eukaryotic photosynthetic organism such as Chlamydomonas can create a designer eukaryotic photosynthetic organism such as designer Chlamydomonas with a Calvin-cycle 3-phosphogylcerate-branched NADPH-enhanced pathway (03-05, 34-43/44 in FIG. 4) for photobiological production of 1-butanol from carbon dioxide and water.

[0316] SEQ ID NO. 143 presents example 143 for a designer Nia1-promoter-controlled chloroplast-targeted Phosphoenolpyruvate Carboxylase (45) DNA construct (3629 bp) that includes a PCR FD primer (sequence 1-20), a 2×84-bp Chlamydomonas reinhardtii Nia1 promoter (21-188), a 135-bp Chlamydomonas reinhardtii RbcS2 transit peptide (189-323), a Phosphoenolpyruvate Carboxylase-encoding sequence (324-3386) selected/modified from Cyanothece sp. PCC 7822 Phosphoenolpyruvate Carboxylase (YP_{—}003887888), a 223-bp Chlamydomonas reinhardtii RbcS2 terminator (3387-3609), and a PCR RE primer (3610-3629).

[0317] SEQ ID NO. 144 presents example 144 for a designer Nia1-promoter-controlled chloroplast-targeted Aspartate Aminotransferase (46) DNA construct (1745 bp) that includes a PCR FD primer (sequence 1-20), a 2×84-bp Chlamydomonas reinhardtii Nia1 promoter (21-188), a 135-bp Chlamydomonas reinhardtii RbcS2 transit peptide (189-323), a Aspartate Aminotransferase-encoding sequence (324-1502) selected/modified from Synechococcus elongatus PCC 6301 Aspartate Aminotransferase (YP_{—}172275), a 223-bp Chlamydomonas reinhardtii RbcS2 terminator (1503-1525), and a PCR RE primer (1526-1745).

[0318] SEQ ID NO. 145 presents example 145 for a designer Nia1-promoter-controlled chloroplast-targeted Aspartokinase (47) DNA construct (2366 bp) that includes a PCR FD primer (sequence 1-20), a 2×84-bp Chlamydomonas reinhardtii Nia1 promoter (21-188), a 135-bp Chlamydomonas reinhardtii RbcS2 transit peptide (189-323), an Aspartokinase-encoding sequence (324-2123) selected/modified from Cyanothece Aspartokinase (YP_{—}003136939), a 223-bp Chlamydomonas RbcS2 terminator (2124-2346), and a PCR RE primer (2347-2366).

[0319] SEQ ID NO. 146 presents example 146 for a designer Nia1-promoter-controlled chloroplast-targeted Aspartate-Semialdehyde Dehydrogenase (48) DNA construct (1604 bp) that includes a PCR FD primer (sequence 1-20), a 2×84-bp Chlamydomonas reinhardtii Nia1 promoter (21-188), a 135-bp Chlamydomonas reinhardtii RbcS2 transit peptide (189-323), an Aspartate-semialdehyde dehydrogenase-encoding sequence (324-1361) selected/modified from Trichodesmium erythraeum IMS101 Aspartate-semialdehyde dehydrogenase (ABG50031), a 223-bp Chlamydomonas RbcS2 terminator (1362-1584), and a PCR RE primer (1585-1604).

[0320] SEQ ID NO. 147 presents example 147 for a designer Nia1-promoter-controlled chloroplast-targeted Homoserine Dehydrogenase (49) DNA construct (1868 bp) that includes a PCR FD primer (sequence 1-20), a 2×84-bp Chlamydomonas Nia1 promoter (21-188), a 135-bp Chlamydomonas RbcS2 transit peptide (189-323), a homoserine dehydrogenase-encoding sequence (324-1625) selected from Cyanothece homoserine dehydrogenase (YP_{—}003887242), a 223-bp Chlamydomonas RbcS2 terminator (1626-1848), and a PCR RE primer (1849-1868).

[0321] SEQ ID NO. 148 presents example 148 for a designer Nia1-promoter-controlled chloroplast-targeted Homoserine Kinase (50) DNA construct (1472 bp) that includes a PCR FD primer (sequence 1-20), a 2×84-bp Chlamydomonas Nia1 promoter (21-188), a 135-bp Chlamydomonas RbcS2 transit peptide (189-323), a Homoserine kinase-encoding sequence (324-1229) selected/modified from Cyanothece Homoserine kinase (YP_{—}003886645), a 223-bp Chlamydomonas RbcS2 terminator (1230-1452), and a PCR RE primer (1453-1472).

[0322] SEQ ID NO. 149 presents example 149 for a designer Nia1-promoter-controlled chloroplast-targeted Threonine Synthase (51) DNA construct (1655 bp) that includes a PCR FD primer (sequence 1-20), a 2×84-bp Chlamydomonas Nia1 promoter (21-188), a 135-bp Chlamydomonas RbcS2 transit peptide (189-323), a Threonine synthase-encoding sequence (324-1412) selected/modified from Cyanothece Threonine synthase (YP_{—}002485009), a 223-bp Chlamydomonas RbcS2 terminator (1413-1635), and a PCR RE primer (1636-1655).

[0323] SEQ ID NO. 150 presents example 150 for a designer Nia1-promoter-controlled chloroplast-targeted Threonine Ammonia-Lyase (52) DNA construct (2078 bp) that includes a PCR FD primer (sequence 1-20), a 2×84-bp Chlamydomonas Nia1 promoter (21-188), a 135-bp Chlamydomonas RbcS2 transit peptide (189-323), a threonine ammonia-lyase-encoding sequence (324-1835) selected/modified from Synechococcus threonine ammonia-lyase (ZP_{—}05035047), a 223-bp Chlamydomonas RbcS2 terminator (1836-2058), and a PCR RE primer (2059-2078).

[0324] Note, use of SEQ ID NOS. 129, 130, 132, 133, 143-150, 137-141 (and/or 141) through genetic transformation of an eukaryotic photosynthetic organism such as Chlamydomonas can create a designer eukaryotic photosynthetic organism such as designer Chlamydomonas with a Calvin-cycle 3-phosphogylcerate-branched NADPH-enhanced pathway (03, 04, 34, 35, 45-52, 39-43/44 in FIG. 4) for photobiological production of 1-butanol from carbon dioxide and water.

[0325] SEQ ID NO. 151 presents example 151 for a designer Nia1-promoter-controlled chloroplast-targeted Acetolactate Synthase (53) DNA construct (2282 bp) that includes a PCR FD primer (sequence 1-20), a 2×84-bp Chlamydomonas reinhardtii Nia1 promoter (21-188), a 135-bp Chlamydomonas RbcS2 transit peptide (189-323), an acetolactate synthase-encoding sequence (324-2039) selected from Bacillus subtilis acetolactate synthase (CAB07802), a 223-bp Chlamydomonas RbcS2 terminator (2040-2262), and a PCR RE primer (2263-2282).

[0326] SEQ ID NO. 152 presents example 152 for a designer Nia1-promoter-controlled chloroplast-targeted Ketol-Acid Reductoisomerase (54) DNA construct (1562 bp) that includes a PCR FD primer (sequence 1-20), a 2×84-bp Chlamydomonas Nia1 promoter (21-188), a 135-bp Chlamydomonas RbcS2 transit peptide (189-323), an enzyme-encoding sequence (324-1319) selected/modified from Cyanothece ketol-acid reductoisomerase (YP_{—}003885458), a 223-bp Chlamydomonas RbcS2 terminator (1320-1542), and a PCR RE primer (1543-1562).

[0327] SEQ ID NO. 153 presents example 153 for a designer Nia1-promoter-controlled chloroplast-targeted Dihydroxy-Acid Dehydratase (55) DNA construct (2252 bp) that includes a PCR FD primer (sequence 1-20), a 2×84-bp Chlamydomonas Nia1 promoter (21-188), a 135-bp Chlamydomonas RbcS2 transit peptide (189-323), a dihydroxy-acid dehydratase-encoding sequence (324-2009) selected from Cyanothece dihydroxy-acid dehydratase (YP_{—}003887466), a 223-bp Chlamydomonas RbcS2 terminator (2010-2232), and a PCR RE primer (2233-2252).

[0328] SEQ ID NO. 154 presents example 154 for a designer Nia1-promoter-controlled chloroplast-targeted 2-Methylbutyraldehyde Reductase (56) DNA construct (1496 bp) that includes a PCR FD primer (sequence 1-20), a 2×84-bp Chlamydomonas reinhardtii Nia1 promoter (21-188), a 135-bp Chlamydomonas reinhardtii RbcS2 transit peptide (189-323), an enzyme-encoding sequence (324-1253) selected/modified from Pichia pastoris GS115 2-methylbutyraldehyde reductase (XP_{—}002490018), a 223-bp Chlamydomonas reinhardtii RbcS2 terminator (1254-1476), and a PCR RE primer (1477-1496).

[0329] Note, use of SEQ ID NOS. 129-137,140, and 151-154 in genetic transformation of an eukaryotic photosynthetic organism such as Chlamydomonas can create a designer eukaryotic photosynthetic organism such as designer Chlamydomonas with a Calvin-cycle 3-phosphogylcerate-branched NADPH-enhanced pathway (03-05, 34-39, 53-55, 42, and 56 in FIG. 5) for photobiological production of 2-methyl-1-butanol from carbon dioxide and water.

[0330] SEQ ID NO. 155 presents example 155 for a designer Nia1-promoter-controlled chloroplast-targeted 3-Methylbutanal Reductase (57) DNA construct (1595 bp) that includes a PCR FD primer (sequence 1-20), a 2×84-bp Chlamydomonas reinhardtii Nia1 promoter (21-188), a 135-bp Chlamydomonas reinhardtii RbcS2 transit peptide (189-323), a 3-methylbutanal reductase-encoding sequence (324-1352) selected/modified from Saccharomyces cerevisiae S288c 3-methylbutanal reductase (DAA10635), a 223-bp Chlamydomonas reinhardtii RbcS2 terminator (1353-1575), and a PCR RE primer (1576-1595).

[0331] Note, use of SEQ ID NOS. 129-133, 151-153, 140 and 141 (or 142) in genetic transformation of an eukaryotic photosynthetic organism such as Chlamydomonas can create a designer eukaryotic photosynthetic organism such as designer Chlamydomonas with a Calvin-cycle 3-phosphogylcerate-branched NADPH-enhanced pathway (03-05, 34, 35, 53-55, 42, and 43 (44) in FIG. 6) for photobiological production of isobutanol from carbon dioxide and water. Whereas, SEQ ID NOS. 129-133, 151-153, 136-138, 140 and 155 represent a designer eukaryotic photosynthetic organism such as designer Chlamydomonas with a Calvin-cycle 3-phosphogylcerate-branched NADPH-enhanced pathway (03-05, 34, 35, 53-55, 40, 38, 39, 42, and 57 in FIG. 6) that can photobiologically produce 3-methyl-1-butanol from carbon dioxide and water.

[0332] SEQ ID NO. 156 presents example 156 for a designer Nia1-promoter-controlled chloroplast-targeted NADH-dependent Butanol Dehydrogenase (12a) DNA construct (1739 bp) that includes a PCR FD primer (sequence 1-20), a 2×84-bp Chlamydomonas reinhardtii Nia1 (nitrate reductase) promoter (21-188), a 135-bp Chlamydomonas reinhardtii RbcS2 transit peptide (189-323), an enzyme-encoding sequence (324-1496) selected/modified from Clostridium perfringens NADH-dependent butanol dehydrogenase (N1³_{—}561774), a 223-bp Chlamydomonas RbcS2 terminator (1497-1719), and a PCR RE primer (1720-1739).

[0333] SEQ ID NO. 157 presents example 157 for a designer Nia1-promoter-controlled chloroplast-targeted NADPH-dependent Butanol Dehydrogenase (12b) DNA construct (1733 bp) that includes a PCR FD primer (sequence 1-20), a 2×84-bp Chlamydomonas reinhardtii Nia1 promoter (21-188), a 135-bp Chlamydomonas reinhardtii RbcS2 transit peptide (189-323), an enzyme-encoding sequence (324-1490) selected/modified from Clostridium saccharobutylicum NADPH-dependent butanol dehydrogenase (AAA83520), a 223-bp Chlamydomonas reinhardtii RbcS2 terminator (1491-1713), and a PCR RE primer (1714-1733).

[0334] Note, use of SEQ ID NOS. 129-140 and 156 (and/or 157) in genetic transformation of an eukaryotic photosynthetic organism such as Chlamydomonas can create a designer eukaryotic photosynthetic organism such as designer Chlamydomonas with a Calvin-cycle 3-phosphogylcerate-branched NADPH-enhanced butanol production pathway (03-05, 34-42 and 12 in FIG. 4) for more specific photobiological production of 1-butanol from carbon dioxide and water. Similarly, SEQ ID NOS. 129, 130, 132, 133, 143-150, 137-140, and 156 (and/or 157) represent another designer eukaryotic photosynthetic organism such as designer Chlamydomonas with a Calvin-cycle 3-phosphogylcerate-branched NADPH-enhanced butanol-production pathway (03, 04, 34, 35, 45-52, 39-42 and 12 in FIG. 4) for photobiological production of 1-butanol from carbon dioxide and water.

[0335] SEQ ID NO. 158 presents example 158 for a designer Nia1-promoter-controlled chloroplast-targeted 3-Ketothiolase (07′) DNA construct (1745 bp) that includes a PCR FD primer (sequence 1-20), a 2×84-bp Chlamydomonas Nia1 (nitrate reductase) promoter (21-188), a 135-bp Chlamydomonas RbcS2 transit peptide (189-323), a 3-Ketothiolase-encoding sequence (324-1502) selected/modified from Azohydromonas lata 3-Ketothiolase (AAD10275), a 223-bp Chlamydomonas RbcS2 terminator (1503-1725), and a PCR RE primer (1726-1745).

[0336] SEQ ID NO. 159 presents a designer Nia1-promoter-controlled chloroplast-targeted 3-Hydroxyacyl-CoA dehydrogenase (08′) DNA construct (1439 bp) that includes a PCR FD primer (sequence 1-20), a 2×84-bp Chlamydomonas Nia1 promoter (21-188), a 135-bp Chlamydomonas RbcS2 transit peptide (189-323), an enzyme-encoding sequence (324-1196) selected/modified from Oceanithermus 3-Hydroxyacyl-CoA dehydrogenase (ADR36325), a 223-bp Chlamydomonas RbcS2 terminator (1197-1419), and a PCR RE primer (1420-1439).

[0337] SEQ ID NO. 160 presents example 160 for a designer Nia1-promoter-controlled chloroplast-targeted Enoyl-CoA dehydratase (09′) DNA construct (1337 bp) that includes a PCR FD primer (sequence 1-20), a 2×84-bp Chlamydomonas Nia1 promoter (21-188), a 135-bp Chlamydomonas RbcS2 transit peptide (189-323), an enzyme-encoding sequence (324-1094) selected/modified from Bordetella petrii Enoyl-CoA dehydratase (YP_{—}001629844), a 223-bp Chlamydomonas RbcS2 terminator (1095-1317), and a PCR RE primer (1318-1337).

[0338] SEQ ID NO. 161 presents example 161 for a designer Nia1-promoter-controlled 2-Enoyl-CoA reductase (10′) DNA construct (1736 bp) that includes a PCR FD primer (sequence 1-20), a 2×84-bp Chlamydomonas Nia1 promoter (21-188), a 135-bp Chlamydomonas RbcS2 transit peptide (189-323), an enzyme-encoding sequence (324-1493) selected/modified from Xanthomonas campestris 2-Enoyl-CoA reductase (YP_{—}001905744), a 223-bp Chlamydomonas RbcS2 terminator (1494-1716), and a PCR RE primer (1717-1736).

[0339] SEQ ID NO. 162 presents example 162 for a designer Nia1-promoter-controlled chloroplast-targeted Acyl-CoA reductase (11′) DNA construct (2036 bp) that includes a PCR FD primer (sequence 1-20), a 2×84-bp Chlamydomonas reinhardtii Nia1 promoter (21-188), a 135-bp Chlamydomonas RbcS2 transit peptide (189-323), an enzyme-encoding sequence (324-1793) selected/modified from Thermosphaera aggregans Acyl-CoA reductase (YP_{—}003649571), a 223-bp Chlamydomonas RbcS2 terminator (1794-2016), and a PCR RE primer (2017-2036).

[0340] SEQ ID NO. 163 presents example 163 for a designer Nia1-promoter-controlled chloroplast-targeted Hexanol Dehydrogenase (12′) DNA construct (1625 bp) that includes a PCR FD primer (sequence 1-20), a 2×84-bp Chlamydomonas Nia1 promoter (21-188), a 135-bp Chlamydomonas RbcS2 transit peptide (189-323), an enzyme-encoding sequence (324-1382) selected/modified from Mycobacterium chubuense hexanol dehydrogenase (ACZ56328), a 223-bp Chlamydomonas RbcS2 terminator (1383-1605), and a PCR RE primer (1606-1625).

[0341] Note, use of SEQ ID NOS. 158-163 with other proper DNA constructs such as SEQ ID NOS. 132 and 133 in genetic transformation of an eukaryotic photosynthetic organism such as Chlamydomonas can create a designer eukaryotic photosynthetic organism such as designer Chlamydomonas with a Calvin-cycle 3-phosphogylcerate-branched NADPH-enhanced hexanol production pathway (34, 35, 03-10, and 07′-12′ in FIG. 7) for photobiological production of 1-hexanol from carbon dioxide and water.

[0342] SEQ ID NO. 164 presents example 164 for a designer Nia1-promoter-controlled chloroplast-targeted Octanol Dehydrogenase (12″) DNA construct (1249 bp) that includes a PCR FD primer (sequence 1-20), a 2×84-bp Chlamydomonas Nia1 promoter (21-188), a 135-bp Chlamydomonas RbcS2 transit peptide (189-323), an enzyme-encoding sequence (324-1006) selected/modified from Drosophila subobscura Octanol dehydrogenase (ABO65263), a 223-bp Chlamydomonas RbcS2 terminator (1007-1229), and a PCR RE primer (1230-1249).

[0343] Note, SEQ ID NOS. 132, 133, and 158-163 represent a designer eukaryotic photosynthetic organism such as a designer Chlamydomonas with a designer hydrocarbon chain elongation pathway (34, 35, 07′-12′ as shown in FIG. 7) for photobiological production of 1-hexanol. SEQ ID NOS: 132, 133, 158-162 and 164 represent another designer eukaryotic photosynthetic organism such as a designer Chlamydomonas with a designer hydrocarbon chain elongation pathway (34, 35, 07′-10′ and 07″-12″ as shown in FIG. 7) for photobiological production of 1-octanol.

[0344] SEQ ID NO. 165: a designer Nia1-promoter-controlled chloroplast-targeted Short Chain Alcohol Dehydrogenase (43′) DNA construct (1769 bp) that includes a PCR FD primer (sequence 1-20), a 2×84-bp Chlamydomonas Nia1 promoter (21-188), a 135-bp Chlamydomonas RbcS2 transit peptide (189-323), an enzyme-encoding sequence (324-1526) selected/modified from Burkholderia Short chain alcohol dehydrogenase (ABO56626), a 223-bp Chlamydomonas RbcS2 terminator (1527-1749), and a PCR RE primer (1750-1769).

[0345] Note, use of SEQ ID NOS. 129-140 and 165 in genetic transformation of an eukaryotic photosynthetic organism such as Chlamydomonas can create a designer eukaryotic photosynthetic organism such as designer Chlamydomonas with a Calvin-cycle 3-phosphogylcerate-branched NADPH-enhanced pathway (03-05, 34-41, 39′-43′, 39′-43′ and 39″-43″ in FIG. 8) for photobiological production of 1-pentanol, 1-hexanol, and 1-heptanol from carbon dioxide and water. Similarly, SEQ ID NOS. 129-140 and 163 represent another designer eukaryotic photosynthetic organism such as designer Chlamydomonas with a Calvin-cycle 3-phosphogylcerate-branched NADPH-enhanced pathway (03-05, 34-41, 39′-41′, 39′-42′ and 12′ in FIG. 8) for photobiological production of 1-hexanol from carbon dioxide and water.

[0346] Likewise, use of SEQ ID NOS. 129-137, 151-153, 138-140 and 165 through genetic transformation of an eukaryotic photosynthetic organism such as Chlamydomonas can create a designer eukaryotic photosynthetic organism such as designer Chlamydomonas with a Calvin-cycle 3-phosphogylcerate-branched NADPH-enhanced pathway (03-05, 34-39, 53-55, 39′-43′, 39′-43′, and 39″-43″ in FIG. 9) for photobiological production of 3-methyl-1-pentanol, 4-methyl-1-hexanol, and 5-methyl-1-heptanol from carbon dioxide and water; The expression of SEQ ID NOS. 129, 130, 132, 133, 143-150, 151-153, 137-140 and 165 in an eukaryotic photosynthetic organism such as a host Chlamydomonas represent another designer eukaryotic photosynthetic organism with a Calvin-cycle 3-phosphogylcerate-branched NADPH-enhanced pathway (03, 05, 34, 35, 42-55, 39′-43′, 39′-43′, and 39″-43″ in FIG. 9) for photobiological production of 3-methyl-1-pentanol, 4-methyl-1-hexanol, and 5-methyl-1-heptanol from carbon dioxide and water; The expression of SEQ ID NOS. 129-133, 151-153, 136-140 and 165 in a host eukaryotic photosynthetic organism such as Chlamydomonas represent yet another designer eukaryotic photosynthetic organism with a Calvin-cycle 3-phosphogylcerate-branched NADPH-enhanced pathway (03-05, 34, 35, 53-55, 40, 38, 39, 39′-43′, 39′-43′, and 39″-43″ in FIG. 10) for photobiological production of 4-methyl-1-pentanol, 5-methyl-1-hexanol, and 6-methyl-1-heptanol from carbon dioxide and water.

Use of Designer Photosynthetic Organisms with Photobioreactor for Production and Harvesting of Butanol and Related Higher Alcohols

[0347] The designer photosynthetic organisms with designer Calvin-cycle channeled photosynthetic NADPH-enhanced pathways (FIGS. 1, and 4-10) can be used with photobioreactors for production and harvesting of butanol and/or related higher alcohols. The said butanol and/or related higher alcohols are selected from the group consisting of: 1-butanol, 2-methyl-1-butanol, isobutanol, 3-methyl-1-butanol, 1-hexanol, 1-octanol, 1-pentanol, 1-heptanol, 3-methyl-1-pentanol, 4-methyl-1-hexanol, 5-methyl-1-heptanol, 4-methyl-1-pentanol, 5-methyl-1-hexanol, 6-methyl-1-heptanol, and combinations thereof

[0348] The said designer photosynthetic organisms such as designer transgenic oxyphotobacteria and algae comprise designer Calvin-cycle-channeled and photosynthetic NADPH-enhanced pathway gene(s) and biosafety-guarding technology for enhanced photobiological production of butanol and related higher alcohols from carbon dioxide and water. According to one of the various embodiments, it is a preferred practice to grow designer photosynthetic organisms photoautotrophically using carbon dioxide (CO₂) and water (H₂O) as the sources of carbon and electrons with a culture medium containing inorganic nutrients. The nutrient elements that are commonly required for oxygenic photosynthetic organism growth are: N, P, and K at the concentrations of about 1-10 mM, and Mg, Ca, S, and Cl at the concentrations of about 0.5 to 1.0 mM, plus some trace elements Mn, Fe, Cu, Zn, B, Co, Mo among others at μM concentration levels. All of the mineral nutrients can be supplied in an aqueous minimal medium that can be made with well-established recipes of oxygenic photosynthetic organism (such as algal) culture media using water (freshwater for the designer freshwater algae; seawater for the salt-tolerant designer marine algae) and relatively small of inexpensive fertilizers and mineral salts such as ammonium bicarbonate (NH₄HCO₃) (or ammonium nitrate, urea, ammonium chloride), potassium phosphates (K₂HPO₄ and KH₂PO₄), magnesium sulfate heptahydrate (MgSO₄.7H₂O), calcium chloride (CaCl₂), zinc sulfate heptahydrate (ZnSO₄.7H₂O), iron (II) sulfate heptahydrate (FeSO₄.7H₂O), and boric acid (H₃BO₃), among others. That is, large amounts of designer algae (or oxyphotobacteria) cells can be inexpensively grown in a short period of time because, under aerobic conditions such as in an open pond, the designer algae can photoautotrophically grow by themselves using air CO₂ as rapidly as their wild-type parental strains. This is a significant feature (benefit) of the invention that could provide a cost-effective solution in generation of photoactive biocatalysts (the designer photosynthetic biofuel-producing organisms such as designer algae or oxyphotobacteria) for renewable solar energy production.

[0349] According to one of the various embodiments, when designer photosynthetic organism culture is grown and ready for photobiological production of butanol and/or related higher alcohols, the designer photosynthetic organism cells are then induced to express the designer Calvin-cycle channeled photosynthetic NADPH-enhanced pathway(s) to photobiologically produce butanol and/or related higher alcohols from carbon dioxide and water. The method of induction is designer pathway gene(s) specific. For example, if/when a nirA promoter is used to control the designer Calvin-cycle channeled pathway gene(s) such as those of SEQ ID NOS: 58-69 and 72 (and/or 73) which represent a designer transgenic Thermosynechococcus that comprises the designer genes of a Calvin-cycle 3-phosphoglycerate-branched photosynthetic NADPH-enhanced pathway (numerically labeled as 34, 35, 03-05, 36-42, and 12 in FIG. 4) for photobiological production of 1-butanol from carbon dioxide and water, the designer transgenic Thermosynechococcus is grown in a minimal liquid culture medium containing ammonium (but no nitrate) and other inorganic nutrients. When the designer transgenic Thermosynechococcus culture is grown and ready for photobiological production of biofuel 1-butanol, nitrate fertilizer will then be added into the culture medium to induce the expression of the designer nirA-controlled Calvin-cycle-channeled pathway to photobiologically produce 1-butanol from carbon dioxide and water in this example.

[0350] For the designer photosynthetic organism(s) with anaerobic promoter-controlled pathway(s) such as the designer transgenic Nostoc that contains designer hox-promoter-controlled Calvin-cycle 3-phosphoglycerate-branched pathway genes of SEQ ID NOS. 104-109, anaerobic conditions can be used to induce the expression of the designer pathway gene(s) for photobiological production of 2-methyl-1-butanol from carbon dioxide and water (FIG. 5). That is, when the designer transgenic Nostoc culture is grown and ready for photobiological biofuel production, its cells will then be placed (or sealed) into certain anaerobic conditions to induce the expression of the designer hox-controlled pathway gene(s) to photobiologically produce 2-methyl-1-butanol from carbon dioxide and water.

[0351] For those designer photosynthetic organism(s) that contains a heat- and light-responsive promoter-controlled and nirA-promoter-controlled pathway(s) such as the designer transgenic Prochlorococcus that contains a set of designer groE-promoter-controlled and nirA-promoter-controlled Calvin-cycle 3-phosphoglycerate-branched pathway genes of SEQ ID NOS. 110-118, light and heat are used in conjunction of nitrate addition to induce the expression of the designer pathway genes for photobiological production of isobutanol from carbon dioxide and water (FIG. 6).

[0352] According to another embodiment, use of designer marine algae or marine oxyphotobacteria enables the use of seawater and/or groundwater for photobiological production of biofuels without requiring freshwater or agricultural soil. For example, designer Prochlorococcus marinus that contains the designer genes of SEQ ID NOS: 110-117 and 119-122 can use seawater and/or certain groundwater for photoautotrophic growth and synthesis of 3-methyl-1-butanol from carbon dioxide and water with its groE promoter-controlled designer Calvin-cycle-channeled pathway (identified as 34 (native), 35, 03-05, 53-55, 38-40, 42 and 57 in FIG. 6). The designer photosynthetic organisms can be used also in a sealed photobioreactor that is operated on a desert for production of isobutanol with highly efficient use of water since there will be little or no water loss by evaporation and/or transpiration that a common crop system would suffer. That is, this embodiment may represent a new generation of renewable energy (butanol and related higher alcohols) production technology without requiring arable land or freshwater resources.

[0353] According to another embodiment, use of nitrogen-fixing designer oxyphotobacteria enables photobiological production of biofuels without requiring nitrogen fertilizer. For example, the designer transgenic Nostoc that contains designer hox-promoter-controlled genes of SEQ ID NOS.104-109 is capable of both fixing nitrogen (N₂) and photobiologically producing 2-methyl-1-butanol from carbon dioxide and water (FIG. 6). Therefore, use of the designer transgenic Nostoc enables photoautotrophic growth and 2-methyl-1-butanol synthesis from carbon dioxide and water.

[0354] Certain designer oxyphotobacteria are designed to perform multiple functions. For example, the designer transgenic Cyanothece that contains designer nirA promoter-controlled genes of SEQ ID NOS. 123-127 is capable of (1) using seawater, (2) N₂ fixing nitrogen, and photobiological producing 1-hexanol from carbon dioxide and water (FIG. 8). Use of this type of designer oxyphotobacteria enables photobiological production of advanced biofuels such as 1-hexanol using seawater without requiring nitrogen fertilizer

[0355] According to one of various embodiments, a method for photobiological production and harvesting of butanol and related higher alcohols comprises: a) introducing a transgenic photosynthetic organism into a photobiological reactor system, the transgenic photosynthetic organism comprising transgenes coding for a set of enzymes configured to act on an intermediate product of a Calvin cycle and to convert the intermediate product into butanol and related higher alcohols; b) using reducing power and energy associated with the transgenic photosynthetic organism acquired from photosynthetic water splitting and proton gradient coupled electron transport process in the photobioreactor to synthesize butanol and related higher alcohols from carbon dioxide and water; and c) using a product separation process to harvest the synthesized butanol and/or related higher alcohols from the photobioreactor.

[0356] In summary, there are a number of embodiments on how the designer organisms may be used for photobiological butanol (and/or related higher alcohols) production. One of the preferred embodiments is to use the designer organisms for direct photosynthetic butanol production from CO₂ and H₂O with a photobiological reactor and butanol-harvesting (filtration and distillation/evaporation) system, which includes a specific operational process described as a series of the following steps: a) Growing a designer transgenic organism photoautotrophically in minimal culture medium using air CO₂ as the carbon source under aerobic (normal) conditions before inducing the expression of the designer butanol-production-pathway genes; b) When the designer organism culture is grown and ready for butanol production, sealing or placing the culture into a specific condition to induce the expression of designer Calvin-cycle-channeled pathway genes; c) When the designer pathway enzymes are expressed, supplying visible light energy such as sunlight for the designer-genes-expressed cells to work as the catalysts for photosynthetic production of butanol and/or related higher alcohols from CO₂ and H₂O; d) Harvesting the product butanol and/or related higher alcohols by any method known to those skilled in the art. For example, harvesting the butanol and/or related higher alcohols from the photobiological reactor can be achieved by a combination of membrane filtration and distillation/evaporation butanol-harvesting techniques.

[0357] The above process to use the designer organisms for photosynthetic production and harvesting of butanol and related higher alcohols can be repeated for a plurality of operational cycles to achieve more desirable results. Any of the steps a) through d) of this process described above can also be adjusted in accordance of the invention to suit for certain specific conditions. In practice, any of the steps a) through d) of the process can be applied in full or in part, and/or in any adjusted combination as well for enhanced photobiological production of butanol and higher alcohol in accordance of this invention.

[0358] In addition to butanol and/or related higher alcohols production, it is also possible to use a designer organism or part of its designer butanol-production pathway(s) to produce certain intermediate products of the designer Calvin-cycle-channeled pathways (FIGS. 1 and 4-10) including (but not limited to): butyraldehyde, butyryl-CoA, crotonyl-CoA, 3-hydroxybutyryl-CoA, acetoacetyl-CoA, acetyl-CoA, pyruvate, phosphoenolpyruvate, 2-phosphoglycerate, 1,3-diphosphoglycerate, glyceraldehye-3-phosphate, dihydroxyacetone phosphate, fructose-1,6-diphosphate, fructose-6-phosphate, glucose-6-phosphate, glucose, glucose-1-phosphate, citramalate, citraconate, methyl-D-malate, 2-ketobutyrate, 2-ketovalerate, oxaloacetate, aspartate, homoserine, threonine, 2-keto-3-methylvalerate, 2-methylbutyraldehyde, 3-methylbutyraldehyde, 4-methyl-2-oxopentanoate, 3-isopropylmalate, 2-isopropylmalate, 2-oxoisovalerate, 2,3-dihydroxy-isovalerate, 2-acetolactate, isobutyraldehyde, 3-keto-C6-acyl-CoA, 3-hydroxy-C6-acyl-CoA, C6-enoyl-CoA, C6-acyl-CoA, 3-keto-C8-acyl-CoA, 3-hydroxy-C8-acyl-CoA, C8-enoyl-CoA, C8-acyl-CoA, octanal, 1-pentanol, 1-hexanal, 1-heptanal, 2-ketohexanoate, 2-ketoheptanoate, 2-ketooctanoate, 2-ethylmalate, 3-ethylmalate, 3-methyl-1-pentanal, 4-methyl-1-hexanal, 5-methyl-1-heptanal, 2-hydroxy-2-ethyl-3-oxobutanoate, 2,3-dihydroxy-3-methyl-pentanoate, 2-keto-4-methyl-hexanoate, 2-keto-5-methyl-heptnoate, 2-keto-6-methyl-octanoate, 4-methyl-1-pentanal, 5-methyl-1-hexanal, 6-methyl-1-heptanal, 2-keto-7-methyl-octanoate, 2-keto-6-methyl-heptanoate, and 2-keto-5-methyl-hexanoate. According to one of various embodiments, therefore, a further embodiment comprises an additional step of harvesting the intermediate products that can be produced also from an induced transgenic designer organism. The production of an intermediate product can be selectively enhanced by switching off a designer-enzyme activity that catalyzes its consumption in the designer pathways. The production of a said intermediate product can be enhanced also by using a designer organism with one or some of designer enzymes omitted from the designer butanol-production pathways. For example, a designer organism with the butanol dehydrogenase or butyraldehyde dehydrogenase omitted from the designer pathway(s) of FIG. 1 may be used to produce butyraldehyde or butyryl-CoA, respectively.

### Designer Calvin-Cycle-Channeled Aerobic Hydrogenotrophic Biofuel Pathways

[0359] According to one of the various embodiments, a designer hydrogenotrophic Calvin-cycle-channeled pathway technology (FIG. 11) is created that takes hydrogen (H₂), oxygen (O₂) and carbon dioxide (CO₂) to produce advanced biofuels including butanol and related higher alcohols through the designer Calvin-cycle-channeled pathways (FIGS. 1 and 4-10). As illustrated in FIG. 11, one of the various embodiments here is the expression of designer oxygen (O₂)-tolerant hydrogenases in a designer microbial cell such as cyanobacteria to generate NAD(P)H and ATP from consumption of hydrogen. The expression of a membrane bound hydrogenase (MBH, 70 and its accessory proteins 72 as listed in Table 1) enables oxidation of H₂ through the respiratory electron transport chain (ETC) system to pump protons (H^{f}) across the cytoplasm membrane to create transmembrane electrochemical potential for ATP synthesis; whereas the use of a soluble hydrogenase (SH, 71 and its accessory proteins 72) enables generation of NAD(P)H through SH-mediated reduction of NAD(P)⁺ by H₂. Use of ATP and NAD(P)H drives the designer Calvin-cycle-channeled pathways (FIGS. 1 and 4-10) for CO₂ fixation and biofuel butanol and related higher alcohol production. Therefore, this represents an innovative application of the designer Calvin-cycle-channeled biofuel-production pathways.

[0360] For example, the expression of a membrane bound hydrogenase (MBH, 70 and its accessory proteins 72) and a soluble hydrogenase (SH, 71 and its accessory proteins 72) in a designer transgenic cyanobacterium that already contains the designer butanol-production-pathway genes of SEQ ID NOS: 58-69 and 72 (and/or 73) can create a hydrogenotrophic Calvin-cycle 3-phosphoglycerate-branched 1-butanol production pathway as numerically labeled as 34, 35, 03-05, 36-42, and 12 in FIG. 4. The net result of the designer hydrogenotrophic pathway is the production of 1-butanol (CH₃CH₂CH₂CH₂OH) from hydrogen (H₂), carbon dioxide (CO₂) and oxygen (O₂) according to the following process reaction:

(12+2n)H₂+4CO₂+nO₂→CH₃CH₂CH₂CH₂OH+(7+n)H₂O [20]

The number (n) of oxygen (O₂) molecules used to oxidize hydrogen (H₂) by the respiratory electron-transport-coupled phosphorylation to support the synthesis of a 1-butuanol was estimated to be about 5 in this example.

[0361] Note, before the designer genes are turned on, the transgenic cyanobacteria (FIG. 11) can grow photoautotrophically using CO₂, H₂O and sunlight just like their wild-type parental strains. When they are grown and ready for use, they can then be placed into a bioreactor supplied with H₂ (about 85%) and CO₂ (about 10%) with limiting amount of O₂ (about 5%) for hydrogenotrophic synthesis of higher alcohols such as 1-butanol, for example, through the Calvin-cycle-channeled butanol-production pathway of FIG. 1 without requiring any photosynthesis or sunlight. Since hydrogen (H₂) can be made from a number of sources including the electrolysis of water, the designer hydrogenotrophic Calvin-cycle-channeled pathway technology (FIG. 11) enables utilization of inexpensive industrial CO₂ and electricity from solar photovoltaic, wind and nuclear power stations to produce “drop-in-ready” liquid transportation fuel such as butanol without requiring any arable lands or photosynthesis.

### Designer Anaerobic Hydrogenotrophic Reductive-Acetyl-CoA Biofuel-Production Pathways

[0362] According to one of the various embodiments, a designer hydrogenotrophic reductive-acetyl-CoA biofuel-production pathway technology (FIG. 12) is created that takes hydrogen (H₂) and carbon dioxide (CO₂) to produce advanced biofuels such as butanol and related higher alcohols under anaerobic conditions. As illustrated in FIG. 12, one of the various embodiments here is the expression of a set of designer genes that confer a designer anaerobic hydrogenotrophic system and a reductive-acetyl-CoA butanol-producing pathway (FIG. 13) in a microbial host cell such as a cyanobacterium. Designer anaerobic hydrogenotrophic system includes, for example, energy converting hydrogenase (Ech, 91 in Table 1), [NiFe]-hydrogenase Mvh (95), Coenzyme F₄₂₀-reducing hydrogenase (Frh, 96), native (or heterologous) soluble hydrogenase (SH, 71), NAD(P)H, reduced ferredoxin (Fd_{red}²⁻), HS-CoM, HS-CoB, and heterodissulfide reductase (Hdr; 94); while designer reductive-acetyl-CoA butanol-producing pathway (as shown with the numerical labels 83-90 and 07-12/43 in FIG. 13) comprises formylmethanofuran dehydrogenase 83, formyl transferase 84, 10-methenyl-tetrahydromethanopterin cyclohydrolase 85, 10-methylene-H₄ methanopterin dehydrogenase 86, 10-methylene-H₄-methanopterin reductase 87, methyl-H₄-methanopterin: corrinoid iron-sulfur protein methyltransferase 88, corrinoid iron-sulfur protein 89, CO dehydrogenase/acetyl-CoA synthase 90, thiolase 07, 3-hydroxybutyryl-CoA dehydrogenase 08, crotonase 09, butyryl-CoA dehydrogenase 10, butyaldehyde dehydrogenase 11, butanol dehydrogenase 12, and/or alcohol dehydrogenase 43. In this example, the net result of the designer anaerobic hydrogenotrophic reductive-acetyl-CoA butanol-production pathway technology (FIGS. 12 and 13) is the production of 1-butanol (CH₃CH₂CH₂CH₂OH) from hydrogen (H₂) and carbon dioxide (CO₂) according to the following process reaction:

12H₂+4CO₂→CH₃CH₂CH₂CH₂OH+7H₂O [21]

The standard free energy change) (ΔᵣG°) for this overall reaction is −244.7 kJ/mol 1-butanol, which demonstrates that this hydrogen-driven butanol-production technology is not in violation of thermodynamic laws. This equation shows that the use of 12 molecules (24 electrons) of hydrogen (H₂) can produce one molecule of 1-butanol from 4 molecules of carbon dioxide (CO₂). To produce 12 molecules of H₂ by electrolysis of water, it uses 24 electrons from electricity. Therefore, if electrolysis of water is used as a hydrogen source, then 24 electrons (from electricity) are sufficient to generate one molecule of 1-butanol from 4 molecules of CO₂ through the designer anaerobic hydrogenotrophic reductive-acetyl-CoA butanol-production pathway technology (FIGS. 12 and 13).

[0363] Therefore, in one of the various embodiments, a designer autotrophic organism comprises a set of designer genes (e.g., designer DNA constructs) that express a set of enzymes conferring the designer anaerobic hydrogenotrophic butanol-production-pathway system (as shown in FIGS. 12 and 13) that comprises: energy converting hydrogenase (Ech) 91, [NiFe]-hydrogenase (Mvh) 95, Coenzyme F₄₂₀-reducing hydrogenase (Frh) 96, native (or heterologous) soluble hydrogenase (SH) 71, heterodissulfide reductase (Hdr) 94, formylmethanofuran dehydrogenase 83, formyl transferase 84, 10-methenyl-tetrahydromethanopterin cyclohydrolase 85, 10-methylene-H₄ methanopterin dehydrogenase 86, 10-methylene-H₄-methanopterin reductase 87, methyl-H₄-methanopterin: corrinoid iron-sulfur protein methyltransferase 88, corrinoid iron-sulfur protein 89, CO dehydrogenase/acetyl-CoA synthase 90, thiolase 07, 3-hydroxybutyryl-CoA dehydrogenase 08, crotonase 09, butyryl-CoA dehydrogenase 10, butyaldehyde dehydrogenase 11, butanol dehydrogenase 12 and/or alcohol dehydrogenase 43.

[0364] Before the designer genes are turned on, the designer transgenic cyanobacteria (FIG. 12) can grow photoautotrophically using CO₂, H₂O and sunlight just like their wild-type parental strains. When they are grown and ready for use, they can then be placed into a bioreactor for butanol production from H₂ and CO₂ under anaerobic conditions without requiring any photosynthesis or any respiratory oxidation of H₂ by molecular oxygen (O₂). A unique feature of this designer reductive-acetyl-CoA butanol-production pathway (FIG. 13) is that it does not require any ATP; this pathway uses reduced ferredoxin (Fd_{red}²), F₄₂₀H₂ and NAD(P)H that the designer anaerobic hydrogenotrophic system (FIG. 12) can supply from H₂ employing certain electro-proton-coupled bioenergetics bifurcating mechanism. In accordance with one of the various embodiments, this designer pathway (FIG. 13) represents one of the most energy-efficient butanol-production processes identified so for. The standard free energy change (ΔG°) of this specific anaerobic hydrogenotrophic butanol-production process [Eq. 21] is −20.4 kJ/mol per H₂ used. Its maximum hydrogen (H₂)-to-butanol energy conversion efficiency was estimated to be about 91.4%.

[0365] According to one of the various embodiments, another designer anaerobic reductive-acetyl-CoA butanol-production pathway (as shown with the numerical labels 74-81 and 07-12/43 in FIG. 14) is created that can produce 1-butanol from H₂ and CO₂ through use of a set of enzymes comprising: formate dehydrogenase 74, 10-formyl-H₄ folate synthetase 75, methenyltetrahydrofolate cyclohydrolase 76, 10-methylene-H₄ folate dehydrogenase 77, 10-methylene-H₄ folate reductase 78, methyl-H₄ folate: corrinoid iron-sulfur protein methyltransferase 79, corrinoid iron-sulfur protein 80, CO dehydrogenase/acetyl-CoA synthase 81, thiolase 07, 3-hydroxybutyryl-CoA dehydrogenase 08, crotonase 09, butyryl-CoA dehydrogenase 10, butyaldehyde dehydrogenase 11, butanol dehydrogenase 12, and/or alcohol dehydrogenase 43.

[0366] This designer pathway is similar to that of FIG. 13, except that it requires consumption of ATP at the step of 10-formyl-H₄ folate synthetase 75 (FIG. 14). Therefore, it requires ATP supply from other cellular processes in order to operate. According to one of the various embodiments, this pathway (FIG. 14) can be supported by a designer methanogenic hydrogenotrophic cell system (FIG. 15) that produces ATP, Fd_{red}²⁻, F₄₂₀H₂, and NAD(P)H. This designer autotrophic organism comprises a set of designer genes (e.g., designer DNA constructs) that express the designer methanogenic hydrogenotrophic butanol-production-pathway system (as shown in FIGS. 14 and 16) comprising: methyl-H4MPT: coenzyme-M methyltransferase Mtr 92, native (or heterologous) A₁Aₒ-ATP synthase 97, methyl-coenzyme M reductase Mcr 93, energy converting hydrogenase (Ech) 91, [NiFe]-hydrogenase (Mvh) 95, Coenzyme F₄₂₀-reducing hydrogenase (Frh) 96, native (or heterologous) soluble hydrogenase (SH) 71, heterodissulfide reductase (Hdr) 94, formylmethanofuran dehydrogenase 83, formyl transferase 84, 10-methenyl-tetrahydromethanopterin cyclohydrolase 85, 10-methylene-H₄ methanopterin dehydrogenase 86, 10-methylene-H₄-methanopterin reductase 87, methyl-H₄-methanopterin: corrinoid iron-sulfur protein methyltransferase 88, corrinoid iron-sulfur protein 89, CO dehydrogenase/acetyl-CoA synthase 90, thiolase 07, 3-hydroxybutyryl-CoA dehydrogenase 08, crotonase 09, butyryl-CoA dehydrogenase 10, butyaldehyde dehydrogenase 11, butanol dehydrogenase 12 and/or alcohol dehydrogenase 43.

[0367] For example, the designer methanogenic hydrogenotrophic system (FIG. 15) comprises methyl-H4MPT: coenzyme-M methyltransferase Mtr 92, A₁Aₒ-ATP synthase 97, energy converting hydrogenase (Ech; 91 in Table 1), [NiFe]-hydrogenase Mvh (95), Coenzyme F₄₂₀-reducing hydrogenase (Frh, 96), native (or heterologous) soluble hydrogenase (SH, 71), NAD(P)H, reduced ferredoxin (Fd_{red}²), HS-CoM, HS-CoM, methyl-coenzyme M reductase Mcr 93, and heterodissulfide reductase (Hdr, 94). The Mtr 92 in this system can take a fraction of the CH₃—H₄MPT intermediate to produce methane and generate a transmembrane electrochemical potential for synthesis of ATP, which can support the ATP-requiring anaerobic reductive-acetyl-CoA butanol-production pathway of FIG. 14. Therefore, the combination of the methanogenic hydrogenotrophic system (FIG. 15) and the ATP-requiring anaerobic reductive-acetyl-CoA butanol-production pathway (FIG. 14) results in a combined pathway (FIG. 16) for production of both butanol and methane. The net result is the production of both butanol and methane (CH₄) from hydrogen (H₂) and carbon dioxide (CO₂) according to the following process reaction where m is the number of CH₄ molecules co-generated per 1-butanol produced:

(12+4m)H₂+(4+m)CO₂→CH₃CH₂CH₂CH₂OH+(7+m)H₂O+mCH₄ [22]

[0368] The non-ATP-requiring anaerobic reductive-acetyl-CoA butanol-production pathway (FIG. 13) can, of course, operate with this designer methanogenic hydrogenotrophic system (FIG. 15) as well, resulting in another combined pathway for production of both butanol and methane (FIG. 17). Therefore, in one of the various embodiments, a designer autotrophic organism comprises a set of designer genes (e.g., designer DNA constructs) that express a designer methanogenic hydrogenotrophic butanol-production-pathway system (as shown in FIGS. 15,13, and 17) comprising: methyl-H4MPT: coenzyme-M methyltransferase Mtr 92, native (or heterologous) A₁Aₒ-ATP synthase 97, methyl-coenzyme M reductase Mcr 93, energy converting hydrogenase (Ech) 91, [NiFe]-hydrogenase (Mvh) 95, Coenzyme F₄₂₀-reducing hydrogenase (Frh) 96, native (or heterologous) soluble hydrogenase (SH) 71, heterodissulfide reductase (Hdr) 94, formate dehydrogenase 74, 10-formyl-H₄ folate synthetase 75, methenyltetrahydrofolate cyclohydrolase 76, 10-methylene-H₄ folate dehydrogenase 77, 10-methylene-H₄ folate reductase 78, methyl-H₄ folate: corrinoid iron-sulfur protein methyltransferase 79, corrinoid iron-sulfur protein 80, CO dehydrogenase/acetyl-CoA synthase 81, thiolase 07, 3-hydroxybutyryl-CoA dehydrogenase 08, crotonase 09, butyryl-CoA dehydrogenase 10, butyaldehyde dehydrogenase 11, butanol dehydrogenase 12, and/or alcohol dehydrogenase 43.

[0369] Some of these enzymes may naturally exist in some of the host organisms depending on their genetic background; some of these native enzymes may be used in constructing part of the designer pathways (FIGS. 12-17) along with designer genes. Therefore, according to one of the various embodiments, a designer autotrophic organism for production of biofuels such as butanol through anaerobic hydrogenotrophic reductive-acetyl-CoA biofuel-production-pathway(s) comprises designer genes that can express at least one of the enzymes selected from the group consisting of: energy converting hydrogenase (Ech) 91, methyl-H4MPT: coenzyme-M methyltransferase Mtr 92, methyl-coenzyme M reductase Mcr 93, heterodissulfide reductase (Hdr) 94, [NiFe]-hydrogenase (Mvh) 95, Coenzyme F₄₂₀-reducing hydrogenase (Frh) 96, soluble hydrogenase (SH) 71, A₁Aₒ-ATP synthase 97, formate dehydrogenase 74, 10-formyl-H₄ folate synthetase 75, methenyltetrahydrofolate cyclohydrolase 76, 10-methylene-H₄ folate dehydrogenase 77, 10-methylene-H₄ folate reductase 78, methyl-H₄ folate: corrinoid iron-sulfur protein methyltransferase 79, corrinoid iron-sulfur protein 80, CO dehydrogenase/acetyl-CoA synthase 81, formylmethanofuran dehydrogenase 83, formyl transferase 84, 10-methenyl-tetrahydromethanopterin cyclohydrolase 85, 10-methylene-H₄ methanopterin dehydrogenase 86, 10-methylene-H₄-methanopterin reductase 87, methyl-H₄-methanopterin: corrinoid iron-sulfur protein methyltransferase 88, corrinoid iron-sulfur protein 89, CO dehydrogenase/acetyl-CoA synthase 90, thiolase 07, 3-hydroxybutyryl-CoA dehydrogenase 08, crotonase 09, butyryl-CoA dehydrogenase 10, butyaldehyde dehydrogenase 11, butanol dehydrogenase 12 and/or alcohol dehydrogenase 43.

[0370] SEQ ID NOS. 166-198 present examples for designer DNA constructs of designer enzymes for creation of designer hydrogenotrophic biofuel-producing organisms such as designer cyanobacteria with reductive-acetyl-CoA biofuel-production pathways. Briefly, SEQ ID NO: 166 presents example 166 of a designer hox-promoter-controlled Formylmethanofuran dehydrogenase (Fmd; 83) DNA construct (6110 bp) that includes a PCR FD primer (sequence 1-20), a 172-bp Nostoc (Anabaena PCC 7120) hox promoter (21-192), an enzyme-encoding sequence (193-5659) selected/modified from the sequence of formylmethanofuran dehydrogenase subunits B, C, E (GenBank: ADL58895, ADL58894, ADL58893) of Methanothermobacter marburgensis and formylmethanofuran dehydrogenase subunits A, D, and G (GenBank: ABC56660, ABC56658, ABC56657) of Methanosphaera stadtmanae, a 432-bp Nostoc sp. strain PCC 7120 gor terminator (5659-6090), and a PCR RE primer (6091-6110) at the 3′ end.

[0371] SEQ ID NO: 167 presents example 167 of a designer hox-promoter-controlled Formyl transferase (84) DNA construct (1538 bp) that includes a PCR FD primer (sequence 1-20), a 172-bp Nostoc (Anabaena PCC 7120) hox promoter (21-192), an enzyme-encoding sequence (193-1086) selected/modified from the sequence of a formylmethanofuran-tetrahydromethanopterin formyltransferase (GenBank: ADL59225) of Methanothermobacter marburgensis, a 432-bp Nostoc gor terminator (1087-1518), and a PCR RE primer (1519-1538).

[0372] SEQ ID NO: 168 presents example 168 of a designer hox-promoter-controlled 5,10-Methenyl-tetrahydromethanopterin (H₄ methanopterin) cyclohydrolase (85) DNA construct (1631 bp) that includes a PCR FD primer (sequence 1-20), a 172-bp Anabaena PCC 7120 hox promoter (21-192), an enzyme-encoding sequence (193-1179) selected from the sequence of a N(5),N(10)-methenyltetrahydromethanopterin cyclohydrolase (GenBank: ABC57615) of Methanosphaera stadtmanae, a 432-bp Nostoc gor terminator (1180-1161), and a PCR RE primer (1162-1631).

[0373] SEQ ID NO: 169 presents example 169 of a designer hox-promoter-controlled 5,10-Methylene-H₄-methanopterin dehydrogenase (86) DNA construct (1475 bp) that includes a PCR FD primer (sequence 1-20), a 172-bp Anabaena PCC 7120 hox promoter (21-192), an enzyme-encoding sequence (193-1023) selected from the sequence of a F₄₂₀-dependent methylene-5,6,7,8-tetrahydromethanopterin dehydrogenase (GenBank: ADL57660) of Methanothermobacter marburgensis, a 432-bp Nostoc gor terminator (1023-1455), and a PCR RE primer (1456-1475).

[0374] SEQ ID NO: 170 presents example 170 of a designer hox-promoter-controlled Methylenetetrahydrofolate reductase and/or Methylene-H₄-methanopterin reductase (78, 87) DNA construct (2594 bp) that includes a PCR FD primer (sequence 1-20), a 172-bp Nostoc sp. strain PCC 7120 (Anabaena PCC 7120) hox promoter (21-192), an enzyme-encoding sequence (193-2142) selected/modified from the sequence of a methylenetetrahydrofolate reductase (GenBank: YP_{—}430048) of Moorella thermoacetica and a coenzyme F₄₂₀-dependent N(5),N(10)-methenyltetrahydromethanopterin reductase (GenBank: ADN36752) of Methanoplanus petrolearius, a 432-bp Nostoc gor terminator (2143-2574), and a PCR RE primer (2575-2594).

[0375] SEQ ID NO: 171 presents example 171 of a designer hox-promoter-controlled Methyltetrahydrofolate:corrinoid/iron-sulfur protein methyltransferase (79, 88) DNA construct (2819 bp) that includes a PCR FD primer (sequence 1-20), a 172-bp Nostoc (Anabaena PCC 7120) hox promoter (21-192), an enzyme-encoding sequence (193-2467) selected/modified from the sequence of a methyltetrahydrofolate:corrinoid/iron-sulfur protein methyltransferase (GenBank: YP_{—}430950) of Moorella thermoacetica, and acetyl-CoA decarbonylase/synthase, subunit gamma (GenBank: ADL57900) of Methanothermobacter marburgensis, a 432-bp Nostoc sp. strain PCC 7120 gor terminator (2468-2899), and a PCR RE primer (2900-2819).

[0376] SEQ ID NO: 172 presents example 172 of a designer hox-promoter-controlled Corrinoid iron-sulfur protein (80, 89) DNA construct (2771 bp) that includes a PCR FD primer (sequence 1-20), a 172-bp Nostoc (Anabaena PCC 7120) hox promoter (21-192), an enzyme-encoding sequence (193-2319) selected/modified from the sequence of a small subunit corrinoid iron-sulfur protein (GenBank: AAA23255) of Moorella thermoacetica, and acetyl-CoA decarbonylase/synthase subunit delta (GenBank: ADL57899) of Methanothermobacter marburgensis, a 432-bp Nostoc gor terminator (2319-2751), and a PCR RE primer (2752-2771).

[0377] SEQ ID NO: 173 presents example 173 of a designer hox-promoter-controlled CO dehydrogenase/acetyl-CoA synthase (81, 90) DNA construct (7061 bp) that includes a PCR FD primer (sequence 1-20), a 172-bp Nostoc (Anabaena PCC 7120) hox promoter (21-192), an enzyme-encoding sequence (193-6609) selected/modified from the sequence of acetyl-CoA decarbonylase/synthase beta subunit/acetyl-CoA decarbonylase/synthase alpha subunit (GenBank: ABC19516) of Moorella thermoacetica, and acetyl-CoA decarbonylase/synthase subunits alpha, beta, epsilon (GenBank: ADL57895, ADL59006, ADL57897) of Methanothermobacter marburgensis, a 432-bp Nostoc sp. strain PCC 7120 gor terminator (6610-7041), and a PCR RE primer (7042-7061).

[0378] SEQ ID NO: 174 presents example 174 of a designer hox-promoter-controlled Thiolase (07) DNA construct (1847 bp) that includes a PCR FD primer (sequence 1-20), a 172-bp Nostoc (Anabaena PCC 7120) hox promoter (21-192), an enzyme-encoding sequence (193-1395) selected/modified from the sequence of thiolase (GenBank: AB190764) of Butyrivibrio fibrisolvens, a 432-bp Nostoc gor terminator (1396-1827), and a PCR RE primer (1828-1847).

[0379] SEQ ID NO: 175 presents example 175 of a designer hox-promoter-controlled 3-Hydroxybutyryl-CoA dehydrogenase (08) DNA construct (1514 bp) that includes a PCR FD primer (sequence 1-20), a 172-bp Nostoc (Anabaena PCC 7120) hox promoter (21-192), an enzyme-encoding sequence (193-1062) selected/modified from the sequence of 3-hydroxybutyryl coenzyme A dehydrogenase (GenBank: Z92974) of Thermoanaerobacterium, a 432-bp Nostoc gor terminator (1063-1494), and a PCR RE primer (1495-1514).

[0380] SEQ ID NO: 176 presents example 176 of a designer hox-promoter-controlled Crotonase (09) DNA construct (1430 bp) that includes a PCR FD primer (sequence 1-20), a 172-bp Nostoc (Anabaena PCC 7120) hox promoter (21-192), an enzyme-encoding sequence (193-978) selected from the sequence of crotonase (GenBank: AF494018) of Clostridium beijerinckii, a 432-bp Nostoc gor terminator (979-1410), and a PCR RE primer (1411-1430).

[0381] SEQ ID NO: 177 presents example 177 of a designer hox-promoter-controlled Butyryl-CoA dehydrogenase (10) DNA construct (1784 bp) that includes a PCR FD primer (sequence 1-20), a 172-bp Nostoc (Anabaena PCC 7120) hox promoter (21-192), an enzyme-encoding sequence (193-1332) selected/modified from the sequence of butyryl-CoA dehydrogenase (GenBank: AF494018) of Clostridium beijerinckii, a 432-bp Nostoc gor terminator (1333-1764), and a PCR RE primer (1765-1784).

[0382] SEQ ID NO: 178 presents example 178 of a designer hox-promoter-controlled Butyraldehyde dehydrogenase (11) DNA construct (2051 bp) that includes a PCR FD primer (sequence 1-20), a 172-bp Nostoc (Anabaena PCC 7120) hox promoter (21-192), an enzyme-encoding sequence (193-1599) selected/modified from the sequence of butyraldehyde dehydrogenase (GenBank: AY251646) of Clostridium saccharoperbutylacetonicum, a 432-bp Nostoc gor terminator (1600-2031), and a PCR RE primer (2032-2051).

[0383] SEQ ID NO: 179 presents example 179 of a designer hox-promoter-controlled NADH-dependent Butanol dehydrogenase (12) DNA construct (1808 bp) that includes a PCR FD primer (sequence 1-20), a 172-bp Nostoc (Anabaena PCC 7120) hox promoter (21-192), an enzyme-encoding sequence (193-1356) selected/modified from the sequence of NADH-dependent butanol dehydrogenase (GenBank: YP_{—}148778) of Geobacillus kaustophilus, a 432-bp Nostoc sp. strain PCC 7120 gor terminator (1367-1788), and a PCR RE primer (1789-1808) at the 3′ end.

[0384] Note, use of SEQ ID NOS. 166-179 in genetic transformation of a microbial host cell including (but not limited to) bacterial cells such as a cyanobacterium Anabaena PCC 7120 can create a designer cyanobacterium such as designer Anabaena with a designer reductive-acetyl-CoA biofuel-production pathway (numerically labeled as 83-90 and 07-12 in FIG. 13) for production of 1-butanol from hydrogen and carbon dioxide without requiring photosynthesis or sunlight. That is, the expression of SEQ ID NOS. 166-179 in a bacterium such as Anabaena PCC 7120 represents a designer organism with the designer hydrogenotrophic reductive-acetyl-CoA biofuel-production pathway (83-90 and 07-12 in FIG. 13) that can operate for anaerobic chemolithoautotrophic production of butanol from hydrogen and carbon dioxide even if it is in complete darkness.

[0385] SEQ ID NO: 180 presents example 180 of a designer hox-promoter-controlled Energy converting hydrogenase (Ech) (91) DNA construct (10538 bp) that includes a PCR FD primer (sequence 1-20), a 172-bp Nostoc (Anabaena PCC 7120) hox promoter (21-192), an enzyme-encoding sequence (193-10086) selected/modified from the sequence of Energy converting hydrogenase subunits (EchA, B, C, D, E, F, G, H, I, J, K, L, M, N, O, P, Q) (GenBank: ABC57807, and ABC57812-ABC57827) of Methanosphaera stadtmanae DSM 3091, a 432-bp Nostoc gor terminator (10087-10518), and a PCR RE primer (10519-10538).

[0386] SEQ ID NO: 181 presents example 181 of a designer hox-promoter-controlled [NiFe]-hydrogenase MvhADG (95) DNA construct (3416 bp) that includes a PCR FD primer (sequence 1-20), a 172-bp Nostoc (Anabaena PCC 7120) hox promoter (21-192), an enzyme-encoding sequence (193-2964) selected/modified from the sequence of [NiFe]-hydrogenase MvhADG (GenBank: ADL59096, ADL59098, ADL59097) of Methanothermobacter marburgensis, a 432-bp Nostoc sp. strain PCC 7120 gor terminator (2965-3396), and a PCR RE primer (3397-3416).

[0387] SEQ ID NO: 182 presents example 182 of a designer hox-promoter-controlled Heterodisulfide reductases (HdrABC, HdrDE) (94) DNA construct (6695 bp) that includes a PCR FD primer (sequence 1-20), a 172-bp Anabaena PCC 7120 hox promoter (21-192), an enzyme-encoding sequence (193-6243) selected/modified from the sequence of Heterodisulfide reductases (HdrABC, HdrDE) (GenBank: AET63985, AET63982, AET63983, AET64166, AET64165) of Methanosaeta harundinacea, a 432-bp Nostoc gor terminator (6244-6675), and a PCR RE primer (6676-6695).

[0388] SEQ ID NO: 183 presents example 183 of a designer hox-promoter-controlled Coenzyme F₄₂₀-reducing hydrogenase (Frh) (96) DNA construct (3407 bp) that includes a PCR FD primer (sequence 1-20), a 172-bp Nostoc sp. strain PCC 7120 (Anabaena PCC 7120) hox promoter (21-192), an enzyme-encoding sequence (193-2955) selected/modified from the sequence of Coenzyme F₄₂₀-reducing hydrogenase (FrhBl-3) (GenBank: YP_{—}003357229, YP_{—}003357467, YP_{—}003357509) of Methanocella paludicola SANAE, a 432-bp Nostoc sp. strain PCC 7120 gor terminator (2956-3387), and a PCR RE primer (3388-3407) at the 3′ end.

[0389] Note, use of SEQ ID NOS. 180-183 in genetic transformation of a microbial host cell including (but not limited to) bacterial cells such as a cyanobacterium Anabaena PCC 7120 can confer an anaerobic chemolithoautotrophic hydrogen (H₂) utilization system [which, as shown in FIG. 12, comprises Energy converting hydrogenase (Ech) (91), [NiFe]-hydrogenase MvhADG (95), Coenzyme F₄₂₀-reducing hydrogenase (Frh) (96), and Coenzyme F₄₂₀-reducing hydrogenase (Frh) (96)] that can produce reducing power (Fd_{red}² and F₄₂₀H₂) from H₂ in support of the designer reductive-acetyl-CoA butanol-production pathway (83-90 and 07-12 in FIG. 13). Therefore, the expression of SEQ ID NOS. 180-183 along with SEQ ID NOS. 166-179 in a bacterium such as Anabaena PCC 7120 represents a designer organism (such as designer Anabaena) with a full designer reductive-acetyl-CoA biofuel-production pathway system (FIGS. 12 and 13) that can operate for anaerobic chemolithoautotrophic production of butanol from hydrogen and carbon dioxide without requiring photosynthesis or aerobic respiration. The net result in this example is the anaerobic chemolithoautotrophic production of butanol from hydrogen and carbon dioxide as shown in the process equation [21].

[0390] Also note, these designer genes (SEQ ID NOS. 166-183) are controlled by a designer hox anaerobic promoter. Therefore, under aerobic conditions such as in an open pond mass culture, the designer Anabaena in this example can quickly grow photoautotrophically using air carbon dioxide and water as the sources of carbon and electrons just like the wild-type parental strain. When the designer Anabaena cells cultures are grown and ready for use (as catalysts in this application), they can then be placed into an anaerobic reactor supplied with industrial CO₂ and H₂ gas for induction of the designer genes expression for anaerobic chemolithoautotrophic production of butanol (as shown in FIGS. 12 and 13) in dark.

[0391] SEQ ID NO: 184 presents example 184 of a designer hox-promoter-controlled Methyl-H4MPT: coenzyme M methyltransferase (MtrA-H) (92) DNA construct (5417 bp) that includes a PCR FD primer (sequence 1-20), a 172-bp Anabaena PCC 7120 hox promoter (21-192), an enzyme-encoding sequence (193-4965) selected/modified from the sequence of Methyl-H4MPT: coenzyme M methyltransferase (MtrA-H) (GenBank: ABC56714, ABC56713, YP_{—}447360, YP_{—}447354, YP_{—}447359, YP_{—}447355) of Methanosphaera stadtmanae, and mtrEF (AETσ⁵⁴⁴⁵, NC_{—}009051) of Methanosaeta harundinacea and Methanoculleus marisnigri, a 432-bp Nostoc sp. strain PCC 7120 gor terminator (4966-5397), and a PCR RE primer (5398-5417).

[0392] SEQ ID NO: 185 presents example 185 of a designer hox-promoter-controlled Methyl-coenzyme M reductase (Mcr) (93) DNA construct (5042 bp) that includes a PCR FD primer (sequence 1-20), a 172-bp Nostoc sp. strain PCC 7120 (Anabaena PCC 7120) hox promoter (21-192), an enzyme-encoding sequence (193-4590) selected/modified from the sequence of methylcoenzyme M reductase subunits A, B, C, G (GenBank: CAE48306, CAE48303, ABC56709, CAE48305) of Methanosphaera stadtmanae, a 432-bp Nostoc sp. strain PCC 7120 gor terminator (4591-5022), and a PCR RE primer (5023-5042).

[0393] Note, use of SEQ ID NOS. 184 and 185 along with SEQ ID NOS. 180-183 in genetic transformation of a microbial host cell including bacterial cells such as a cyanobacterium Anabaena PCC 7120 can confer a methanogenic hydrogenotrophic system which, as shown in FIG. 15, comprises Methyl-H4MPT: coenzyme M methyltransferase (MtrA-H) (92), Methyl-coenzyme M reductase (Mcr) (93), Energy converting hydrogenase (Ech) (91), [NiFe]-hydrogenase MvhADG (95), Coenzyme F₄₂₀-reducing hydrogenase (Frh) (96), Coenzyme F₄₂₀-reducing hydrogenase (Frh) (96). These enzymes along with a native ATPase 97 can produce ATP and reducing power (Fd_{red}²⁻ and F₄₂₀H₂) from H₂ in support of the designer reductive-acetyl-CoA methanogenic butanol-production pathways (FIGS. 16 and 17). Therefore, the expression of SEQ ID NOS. 180-185 along with SEQ ID NOS. 166-179 in a bacterium such as Anabaena PCC 7120 represents a designer organism (such as designer Anabaena) with a designer hydrogenotrophic reductive-acetyl-CoA methanogenic biofuel-production pathway system (FIGS. 15 and 17) that can operate for anaerobic production of both butanol and methane from hydrogen and carbon dioxide without requiring any photosynthesis. The net result in this example is the anaerobic chemolithoautotrophic production of butanol and methane from hydrogen and carbon dioxide as shown in the process equation [22].

[0394] SEQ ID NO: 186 presents example 186 of a designer hox-promoter-controlled Formate dehydrogenase (74) DNA construct (5450 bp) that includes a PCR FD primer (sequence 1-20), a 172-bp Nostoc sp. strain PCC 7120 (Anabaena PCC 7120) hox promoter (21-192), an enzyme-encoding sequence (193-4998) selected/modified from the sequence of formate dehydrogenase alpha and beta subunits (GenBank: AAB18330, AAB18329) of Moorella thermoacetica, a 432-bp Nostoc sp. strain PCC 7120 gor terminator (4999-5430), and a PCR RE primer (5431-5450).

[0395] SEQ ID NO: 187 presents example 187 of a designer hox-promoter-controlled 10-Formyl-H₄ folate synthetase (75) DNA construct (2324 bp) that includes a PCR FD primer (sequence 1-20), a 172-bp Nostoc (Anabaena PCC 7120) hox promoter (21-192), an enzyme-encoding sequence (193-1872) selected/modified from the sequence of 10-formyltetrahydrofolate synthetase (GenBank: YP_{—}428991) of Moorella thermoacetica, a 432-bp Nostoc sp. strain PCC 7120 gor terminator (1873-2304), and a PCR RE primer (2305-2324).

[0396] SEQ ID NO: 188 presents example 188 of a designer hox-promoter-controlled 10-Methenyl-H₄ folate cyclohydrolase (76) DNA construct (1487 bp) that includes a PCR FD primer (sequence 1-20), a 172-bp Nostoc (Anabaena PCC 7120) hox promoter (21-192), an enzyme-encoding sequence (193-1035) selected/modified from the sequence of methenyltetrahydrofolate cyclohydrolase (GenBank: YP_{—}430368) of Moorella thermoacetica ATCC 39073, a 432-bp Nostoc gor terminator (1036-1467), and a PCR RE primer (1468-1487).

[0397] SEQ ID NO: 189 presents example 189 of a designer hox-promoter-controlled 10-Methylene-H₄ folate dehydrogenase (77) DNA construct (1487 bp) that includes a PCR FD primer (sequence 1-20), a 172-bp Nostoc (Anabaena PCC 7120) hox promoter (21-192), an enzyme-encoding sequence (193-1035) selected/modified from the sequence of methenyltetrahydrofolate cyclohydrolase/5,10-methylenetetrahydrofolate dehydrogenase (GenBank: ABC19825) of Moorella thermoacetica, a 432-bp Nostoc sp. strain PCC 7120 gor terminator (1036-1467), and a PCR RE primer (1468-1487).

[0398] SEQ ID NO: 190 presents example 190 of a designer hox-promoter-controlled 10-Methylene-H₄ folate reductase (78) DNA construct (1565 bp) that includes a PCR FD primer (sequence 1-20), a 172-bp Nostoc (Anabaena PCC 7120) hox promoter (21-192), an enzyme-encoding sequence (193-1113) selected/modified from the sequence of methylenetetrahydrofolate reductase (GenBank: ABC19505) of Moorella thermoacetica, a 432-bp Nostoc gor terminator (1114-1545), and a PCR RE primer (1546-1565).

[0399] SEQ ID NO: 191 presents example 191 of a designer hox-promoter-controlled Methyl-H₄ folate: corrinoid iron-sulfur protein Methyltransferase (79) DNA construct (1442 bp) that includes a PCR FD primer (sequence 1-20), a 172-bp Anabaena PCC 7120 hox promoter (21-192), an enzyme-encoding sequence (193-690) selected/modified from the sequence of methyltetrahydrofolate:corrinoid/iron-sulfur protein methyltransferase (GenBank: YP_{—}430174) of Moorella thermoacetica, a 432-bp Nostoc gor terminator (691-1122), and a PCR RE primer (1123-1442).

[0400] SEQ ID NO: 192 presents example 192 of a designer hox-promoter-controlled Corrinoid iron-sulfur protein (80) DNA construct (2942 bp) that includes a PCR FD primer (sequence 1-20), a 172-bp Anabaena hox promoter (21-192), an enzyme-encoding sequence (193-2490) selected/modified from the sequence of corrinoid iron-sulfur protein large and small subunits (GenBank: AEI90745, AEI90746) of Clostridium autoethanogenum, a 432-bp Nostoc sp. strain PCC 7120 gor terminator (2491-2922), and a PCR RE primer (2923-2942).

[0401] SEQ ID NO: 193 presents example 193 of a designer hox-promoter-controlled CO dehydrogenase/acetyl-CoA synthase (81) DNA construct (4859 bp) that includes a PCR FD primer (sequence 1-20), a 172-bp Anabaena PCC 7120 hox promoter (21-192), an enzyme-encoding sequence (193-4407) selected/modified from the sequence of carbon monoxide dehydrogenase alpha subunit alpha and beta subunits (GenBank: AAA23229, AAA23228) of Moorella thermoacetica, a 432-bp Nostoc gor terminator (4408-4839), and a PCR RE primer (4840-4859).

[0402] Note, use of SEQ ID NOS. 186-193 along with SEQ ID NOS. 174-179 in genetic transformation of a microbial host cell such as a cyanobacterium Anabaena PCC 7120 confers an ATP-requiring reductive-acetyl-CoA butanol-production pathway (74-81 and 07-12/42 in FIG. 14). Similarly, the expression of SEQ ID NOS. 186-193 and SEQ ID NOS. 180-185 along with SEQ ID NOS. 174-179 in a bacterium such as Anabaena PCC 7120 represents a designer organism (such as designer Anabaena) with a designer ATP-requiring reductive-acetyl-CoA methanogenic biofuel-production pathway and a hydrogenotrophic methanogenesis-coupled ATP-generating system (FIGS. 15 and 16) that can operate for production of both butanol and methane from hydrogen and carbon dioxide. The net result in this example is the anaerobic chemolithotrophic production of both butanol and methane from hydrogen and carbon dioxide as shown in the process equation [22].

[0403] SEQ ID NO: 194 presents example 194 of a designer hox-promoter-controlled F₄₂₀ synthesis enzymes (99) DNA construct (6428 bp) that includes a PCR FD primer (sequence 1-20), a 172-bp Anabaena PCC 7120 hox promoter (21-192), enzymes-encoding sequence (193-4976) selected/modified from the sequence of lactaldehyde dehydrogenase CofA (GenBank: ADC46523) of Methanobrevibacter ruminantium, 2-phospho-1-lactate guanylyltransferase (GenBank: ADL58588) of Methanothermobacter Marburgensis, 2-phospho-L-lactate transferase (GenBank: NP_{—}987524) of Methanococcus maripaludis, coenzyme F420-0 gamma-glutamyl ligase (YP_{—}001030766) of Methanocorpusculum labreanum, FO synthase subunits 1 and 2 (YP_{—}003357513, YP_{—}003357511) of Methanocella paludicolam, a 432-bp Nostoc sp. strain PCC 7120 gor terminator (4977-6408), and a PCR RE primer (6409-6428).

[0404] SEQ ID NO: 195 presents example 195 of a designer hox-promoter-controlled Pyridoxal phosphate-dependent L-tyrosine decarboxylase (mfnA for methanofuran synthesis) (100) DNA construct (1778 bp) that includes a PCR FD primer (sequence 1-20), a 172-bp Anabaena PCC 7120 hox promoter (21-192), an enzyme-encoding sequence (193-1326) selected/modified from the sequence of L-tyrosine decarboxylase (GenBank: YP_{—}003355454) of Methanocella paludicola, a 432-bp Nostoc gor terminator (1327-1758), and a PCR RE primer (1759-1778).

[0405] SEQ ID NO: 196 presents example 196 of a designer hox-promoter-controlled Methanopterin synthesis enzymes (101) DNA construct (3215 bp) that includes a PCR FD primer (sequence 1-20), a 172-bp Anabaena PCC 7120 hox promoter (21-192), an enzymes-encoding sequence (193-2763) selected/modified from the sequence of GTP cyclohydrolase (GenBank: YP_{—}447347) of Methanosphaera stadtmanae DSM 3091, cyclic phosphodiesterase MptB (ABO35741) of Methanococcus maripaludis C5, beta-ribofuranosylaminobenzene 5′-phosphate synthase (YP_{—}003356610) of Methanocella paludicola SANAE, a 432-bp Nostoc sp. strain PCC 7120 gor terminator (2764-3195), and a PCR RE primer (3195-3215).

[0406] SEQ ID NO: 197 presents example 197 of a designer hox-promoter-controlled Coenzyme M synthesis enzymes (102) DNA construct (4226 bp) that includes a PCR FD primer (sequence 1-20), a 172-bp Nostoc sp. strain PCC 7120 (Anabaena PCC 7120) hox promoter (21-192), an enzymes-encoding sequence (193-3774) selected/modified from the sequence of phosphosulfolactate synthase, 2-phosphosulfolactate phosphatase and sulfolactate dehydrogenase (GenBank: ADL57861, YP_{—}003850451, ADL59162) of Methanothermobacter marburgensis, and sulfopyruvate decarboxylase (YP_{—}003357048) of Methanocella paludicola SANAE, a 432-bp Nostoc sp. strain PCC 7120 gor terminator (3775-4026), and a PCR RE primer (4027-4226).

[0407] SEQ ID NO: 198 presents example 198 of a designer hox-promoter-controlled Coenzyme B synthesis enzymes (103) DNA construct (5198 bp) that includes a PCR FD primer (sequence 1-20), a 172-bp Anabaena PCC 7120 hox promoter (21-192), an enzymes-encoding sequence (193-4746) selected/modified from the sequence of isopropylmalate synthase, isopropylmalate dehydrogenase (GenBank: AAM01606, NP_{—}614498) of Methanopyrus kandleri, isopropylmalate isomerase large and small subunits (ADP98363, ADP98362) of Marinobacter adhaerens, a 432-bp Nostoc gor terminator (4747-5178), and a PCR RE primer (5179-5198).

[0408] Note, the expression of SEQ ID NOS. 194-198 in a microbial host cell such as cyanobacterium Anabaena PCC 7120 provides the ability of synthesizing some of the cofactors such as F₄₂₀, methanofuran, methanopterin, Coenzyme M, and Coenzyme B that are needed for the designer hydrogenotrophic reductive-acetyl-CoA biofuel-production pathways (of FIGS. 13, 14, 16 and 17) to properly operate. Depending on the genetic backgrounds of various host cells such as cyanobacteria, many of them may or may not possess some of these enzymes to synthesize this type of special cofactors. Therefore, in one of the various embodiments, it is a preferred practice to express this type of designer cofactor-synthesis enzymes (e.g., SEQ ID NOS. 194-198) along with the hydrogenotrophic designer reductive-acetyl-CoA biofuel-production pathway genes (e.g., SEQ ID NOS. 166-193) as shown in these examples.

[0409] Note, many of the hydrogenotrophic bacteria and methanogens such as Methanocella paludicola SANAE naturally possess certain hydrogenotrophic and/or reductive acetyl-CoA pathway(s) and the ability of synthesizing the associated cofactors including F420, methanofuran, methanopterin, Coenzyme M, and Coenzyme B. Therefore, in one of the various embodiments, it is also a preferred practice to express certain designer genes of biofuel-production-pathways (FIGS. 1, 4, 5, 6, 7, 8, 10, 13, and 14) such as SEQ ID NOS. 174-179 in a hydrogenotrophic and/or methanogenic host cell for chemolithotrophic production of advanced biofuels such as 1-buatanol from hydrogen (H₂) and carbon dioxide (CO₂). According to one of the various embodiments, a hydrogenotrophic and/or fermentative or methanogenic host organism for this specific application is selected from the group consisting of: Methanocella paludicola SANAE, Acinetobacter baumannii ABNIH3, Acinetobacter baumannii ABNIH4, Acinetobacter sp. DR1, Agrobacterium sp. H13-3; Agrobacterium vitis S4, Alcaligenes sp., Allochromatium vinosum DSM 180, Amycolatopsis mediterranei 5699, Anoxybacillus flavithermus WK1, Aquifex aeolicus VF5, Archaeoglobus fulgidus DSM 4304, Archaeoglobus veneficus SNP6, Azospirillum sp. B510, Burkholderia cenocepacia H12424, Caldicellulosiruptor bescii DSM 6725, Carboxydothermus hydrogenoformans, Centipeda periodontii DSM 2778, Clostridium autoethanogenum, Clostridium ragsdalei, Clostridium sticklandii DSM 519, Clostridium sticklandii, Corynebacterium glutamicum, Cupriavidus metallidurans CH34, Cupriavidus necator N-1, Desulfobacca acetoxidans DSM 11109, Exiguobacterium sp. AT1b, Ferrimonas balearica DSM 9799, Ferroglobus placidus DSM 10642, Geobacillus kaustophilus HTA426, Helicobacter bilis ATCC 43879, Herbaspirillum seropedicae SmR1, Hydrogenobacter thermophilus TK-6, Hydrogenovibrio marinus, Klebsiella variicola At-22, Methanobacterium sp. SWAN-1, Methanobrevibacter ruminantium M1, Methanocaldococcus fervens AG86, Methanocaldococcus infernus ME, Methanocaldococcus jannaschii, Methanocaldococcus sp. FS406-22, Methanocaldococcus vulcanius M7, Methanococcus aeolicus Nankai-3, Methanococcus maripaludis C6, Methanococcus maripaludis S2, Methanococcus voltae A3, Methanocorpusculum labreanum Z, Methanoculleus marisnigri JR1, Methanohalophilus mahii DSM 5219, Methanolinea tarda NOBI-1, Methanoplanus petrolearius DSM 11571, Methanoplanus petrolearius, Methanopyrus kandleri AV19, Methanoregula boonei 6A8, Methanosaeta harundinacea 6Ac, Methanosalsum zhilinae DSM 4017, Methanosarcina acetivorans C2A, Methanosarcina barkeri str. Fusaro, Methanosarcina mazei Go1, Methanosphaera stadtmanae, Methanospirillum hungatei JF-1, Methanothermobacter marburgensis str. Marburg, Methanothermobacter marburgensis, Methanothermobacter thermautotrophicus, Methanothermococcus okinawensis IH1, Methanothermus fervidus DSM 2088, Methylobacillus flagellates, Methylobacterium organophilum, Methylococcus capsulatus, Methylomicrobium kenyense, Methylomonas methanica MC09, Methylomonas sp. LW13, Methylosinus sp. LW2, Methylosinus trichosporium OB3b, Methylotenera mobilis JLW8, Methylotenera versatilis 301, Methylovorus glucosetrophus SIP3-4, Moorella thermoacetica ATCC 39073, Moorella thermoacetica, Oligotropha carboxidovorans OM5, Paenibacillus terrae HPL-003, Pelotomaculum thermopropionicum SI, Planctomyces brasiliensis DSM 5305, Pyrococcus furiosus DSM 3638, Pyrococcus horikoshii OT3, Pyrococcus yayanosii CHJ, Ralstonia eutropha H16, Rubrivivax sp., Selenomonas noxia ATCC 43541, Shewanella baltica BA175, Stenotrophomonas sp. SKA14, Synechococcus sp. JA-2-3B′a(2-13), Synechococcus sp. JA-3-3Ab, Thermococcus gammatolerans EJ3, Thermococcus kodakarensis KOD1, Thermococcus onnurineus NA1, Thermococcus sp. 4557, Thermodesulfatator indicus DSM 15286, Thermofilum pendens Hrk 5, Thermotoga lettingae TMO, Thermotoga petrophila RKU-1, Thiocapsa roseopersicina, Thiomonas intermedia K12, Xanthobacter autotrophicus, Yersinia pestis Antigua, Phaeodactylum tricornutum, Methanosarcina barkeri, and Microcoleus vaginatu, and combinations thereof.

### Designer Methanol-Production Pathways

[0410] According to one of the various embodiments, a designer methanol-production pathway is created in a transgenic organism to convert carbon dioxide into methanol (FIG. 18). This designer methanol-production pathway comprises three different dehydrogenases: a formate dehydrogenase (FₐₜₑDH) 109, formaldehyde dehydrogenase (F_{ald}DH) 110, and an alcohol dehydrogenase (ADH) 43 (or 44) as numerically labeled in FIG. 18. The methanol-production pathway process consists of three steps: 1) the reduction of CO₂ to formate catalyzed by formate dehydrogenase (FₐₜₑDH), 2) the reduction of formate to formaldehyde by formaldehyde dehydrogenase (F_{ald}DH), and 3) the reduction of formaldehyde to methanol by alcohol dehydrogenase (ADH). Reduced nicotinamide adenine dinucleotide (NADH), acts as a terminal electron donor for each of these dehydrogenase-catalyzed reductions. Note, in a hydrogenotrophic process (FIG. 19), reduced nicotinamide adenine dinucleotide (NADH) can be regenerated through reduction of NAD⁺ by use of molecular hydrogen (H₂) under the catalysis of a hydrogenase. Therefore, use of the designer methanol-production pathway in an anaerobic hydrogenotrophic host organism can produce methanol from CO₂ and H₂ through the following hydrogenotrophic process reaction:

CO₂+3H₂→CH₃OH+H₂O [23]

[0411] According to one of the various embodiments, as shown in FIG. 18, the supply of reduced nicotinamide adenine dinucleotide (NADH) for the designer methanol-production pathway in a transgenic photosynthetic organism is accomplished through the use of an NADPH/NADH conversion process that, as disclosed in equations 3 and 4 above, is achieved by a two-step mechanism: 1) Use of an NADPH-dependent glyceraldehyde-3-phosphate dehydrogenase 34, which uses NADPH in reducing 1,3-diphosphoglycerate to glyceraldehydes-3-phosphate; and 2) use of an NAD⁺-dependent glyceraldehyde-3-phosphate dehydrogenase 35, which produces NADH in oxidizing glyceraldehyde-3-phosphate to1,3-diphosphoglycerate. The net result of this two-step mechanism is the conversion of photosynthetically generated NADPH to NADH, which can support the designer methanol-production pathway for synthesis of methanol from carbon dioxide and water according to the following process reaction:

2CO₂+4H₂O→2CH₃OH+3O₂ [24]

[0412] SEQ ID NO: 199 presents example 199 of a designer nirA-promoter-controlled NAD-dependent formate dehydrogenase DNA construct (1636 bp) that includes a PCR FD primer (sequence 1-20), a 89-bp Synechocystis sp. strain PCC 6803 nitrite-reductase nirA promoter (21-109), an enzyme-encoding sequence (110-1207) selected from a Komagataella pastoris NAD-dependent formate dehydrogenase (GenBank: AB472090), a 409-bp Synechocystis sp. PCC 6803 rbcS terminator (1208-1616), and a PCR RE primer (1617-1636).

[0413] SEQ ID NO: 200 presents example 200 of a designer nirA-promoter-controlled Formaldehyde dehydrogenase DNA construct (1567 bp) that includes a PCR FD primer (sequence 1-20), a 89-bp Synechocystis sp. strain PCC 6803 nitrite-reductase nirA promoter (21-109), an enzyme-encoding sequence (110-1138) selected from a Mycobacterium marinum Formaldehyde dehydrogenase (GenBank: EPQ77120), a 409-bp Synechocystis sp. PCC 6803 rbcS terminator (1139-1547), and a PCR RE primer (1548-1567).

[0414] SEQ ID NO: 201 presents example 201 of a designer nirA-promoter-controlled NAD(P)H-dependent Alcohol dehydrogenase DNA construct (1549 bp) that includes a PCR FD primer (sequence 1-20), a 89-bp Synechocystis sp. strain PCC 6803 nitrite-reductase nirA promoter (21-109), an enzyme-encoding sequence (110-1120) selected from a Methylophaga thiooxydans Alcohol dehydrogenase (GenBank: KGM07167) for methanol, a 409-bp Synechocystis sp. PCC 6803 rbcS terminator (1121-1529), and a PCR RE primer (1530-1549).

[0415] Note, use of SEQ ID NOS. 199-201 in genetic transformation of a microbial host cell such as a cyanobacterium Synechocystis sp. strain PCC 6803 confers a designer methanol-production pathway (109, 110, 43 or 44 in FIG. 18). As described previously, the use of a soluble hydrogenase (SH, 71 and its accessory proteins 72) enables generation of NAD(P)H through SH-mediated reduction of NAD(P)⁺ by H₂. Therefore, the expression of SEQ ID NOS. 199-201 in combination with the soluble hydrogenase (SH, 71 and its accessory proteins 72) can produce methanol from CO₂ and H₂ according to the hydrogenotrophic process reaction [23].

[0416] SEQ ID NO: 202 presents example 202 of a designer nirA-promoter-controlled Formate dehydrogenase DNA construct (1180 bp) that includes a PCR FD primer (sequence 1-20), a 231-bp nirA promoter from Thermosynechococcus elongatus BP1 (21-251), an enzyme-encoding sequence (252-1040) selected/modified from the sequences of a Bacillus subtilis Formate dehydrogenase (KFC29810), a 120-bp rbcS terminator from BP1 (1041-1160), and a PCR RE primer (1161-1180) at the 3′ end.

[0417] SEQ ID NO: 203 presents example 203 of a designer nirA-promoter-controlled formaldehyde dehydrogenase DNA construct (1432 bp) that includes a PCR FD primer (sequence 1-20), a 231-bp nirA promoter from Thermosynechococcus elongatus BP1 (21-251), an enzyme-encoding sequence (252-1292) selected/modified from the sequences of a Geobacillus thermoglucosidans formaldehyde dehydrogenase (EID43710), a 120-bp rbcS terminator from BP1 (1293-1412), and a PCR RE primer (1413-1432) at the 3′ end.

[0418] SEQ ID NO: 204 presents example 204 of a designer nirA-promoter-controlled thermo tolerant NADPH-dependent Alcohol Dehydrogenase DNA construct (1579 bp) that includes a PCR FD primer (sequence 1-20), a 231-bp nirA promoter from Thermosynechococcus elongatus BP1 (21-251), an enzyme-encoding sequence (252-1439) selected/modified from the sequences of a Pelotomaculum thermopropionicum NADPH-dependent Alcohol Dehydrogenase (BAF58669) which can be used for methanol production, a 120-bp rbcS terminator from BP1 (1440-1559), and a PCR RE primer (1560-1579) at the 3′ end.

[0419] Note, use of SEQ ID NOS. 202-204, 58 and 59 in genetic transformation of a microbial host cell including (but not limited to) bacterial cells such as a cyanobacterium Thermosynechococcus elongatus can create a designer cyanobacterium such as designer Thermosynechococcus with a designer methanol-production pathway (numerically labeled as 109, 110, 44, 34 and 35 in FIG. 18) for production of methanol from water and carbon dioxide. The use of an NADPH-dependent glyceraldehyde-3-phosphate dehydrogenase 34 and an NAD⁺-dependent glyceraldehyde-3-phosphate dehydrogenase 35 (encoded by SEQ ID NOS. 58 and 59) provides the two-step mechanism for the conversion of photosynthetically generated NADPH to NADH, which can support the designer methanol-production pathway for production of methanol from carbon dioxide and water according to the photoautotrophic process reaction [24].

### Designer Alcohol-Biodiesel-Production Pathways

[0420] According to one of the various embodiments, a designer lipase 106 gene is expressed in combination with an alcohol (ROH)-production-pathway (FIGS. 18, 19, and 20), which results in production of biodiesel (R₁COOR) through the following lipase-catalyzed reaction:

R₁COOH+ROH→R₁COOR+H₂O [25]

Wherein fatty acid (R₁COOH) is from the cell's natural fatty-acid synthesis pathway while alcohol (ROH) is from the designer alcohol-production pathway that is expressed in conjunction with the expression of designer lipase gene. Here, the “R₁” group represents the hydrocarbon chain of a fatty acid. The “R” group represents the hydrocarbon part of an alcohol such as methanol, ethanol, propanol, 1-butanol, isobutanol or pentanol molecule.

[0421] According to one of the various embodiments, host cells typically have native lipid synthesis pathway(s) that can produce triglyceride (R₁OCOCH₂—CH(OCOR₂)—CH₂OCOR₃) in which “R₁”, “R₂” and “R₃” represent the three hydrocarbon chains of the acyl groups Therefore, the expression of lipase 106 in combination with alcohol-production pathway(s) in host cells (FIGS. 19 and 20) can results in production of biodiesel molecules (R₁COOR, R₂COOR, and R₃COOR) through the following lipase-catalyzed triglyceride transesterification reactions. First, a triglyceride is transesterified with an alcohol (ROH) to a biodiesel (R₁COOR) and a diglyceride (HOCH₂—CH(OCOR₂)—CH₂OCOR₃):

R₁OCOCH₂—CH(OCOR₂)—CH₂OCOR₃+ROH→R₁COOR+HOCH₂—CH(OCOR₂)—CH₂OCOR₃

Then, the diglyceride (HOCH₂—CH(OCOR₂)—CH₂OCOR₃) from the process above is further transesterified to another biodiesel molecule (R₂COOR) and a monoglyceride (HOCH₂—CH(OH)—CH₂OCOR₃):

HOCH₂—CH(OCOR₂)—CH₂OCOR₃+ROH→R₂COOR+HOCH₂—CH(OH)—CH₂OCOR₃

Finally, the monoglyceride (HOCH₂—CH(OH)—CH₂OCOR₃) is transesterified to produce yet another biodiesel molecule (R3COOR) with glycerol (HOCH₂—CH(OH)—CH(OH) as a byproduct:

HOCH₂—CH(OH)—CH₂OCOR₃+ROH→R₃COOR+HOCH₂—CH(OH)—CH₂OH

[0422] Therefore, the innovative use of a lipase and an alcohol in vivo and/or in vitro enables the conversion of lipids including fatty acids and triglycerides into biodiesel. According to one of the various embodiments, the alcohol (ROH) that is utilized in these lipase-catalyzed biodiesel-production reactions is selected from the group consisting of methanol, ethanol, propanol, 1-butanol, isobutanol, 2-methyl-1-butanol, isobutanol, 3-methyl-1-butanol, 1-hexanol, 1-octanol, 1-pentanol, 1-heptanol, 3-methyl-1-pentanol, 4-methyl-1-hexanol, 5-methyl-1-heptanol, 4-methyl-1-pentanol, 5-methyl-1-hexanol, 6-methyl-1-heptanol, and/or combination thereof.

[0423] According to one of the various embodiments, as illustrated in FIG. 18, a designer photoautotrophic methanol-biodiesel-production pathway in a transgenic photosynthetic organism comprises: NADPH-dependent glyceraldehyde-3-phosphate dehydrogenase 34, NAD⁺-dependent glyceraldehyde-3-phosphate dehydrogenase 35, formate dehydrogenase (FₐₜₑDH) 109, formaldehyde dehydrogenase (F_{ald}DH) 110, alcohol dehydrogenase (ADH) 43 (or 44), and lipase 106.

[0424] According to another embodiment, a designer hydrogenotrophic methanol-biodiesel production pathway in a transgenic organism comprises: NAD-reducing soluble hydrogenase 71 (FIG. 12), formate dehydrogenase (FₐₜₑDH) 109, formaldehyde dehydrogenase (F_{ald}DH) 110, alcohol dehydrogenase (ADH) 43 (or 44), and lipase 106 (FIG. 18).

[0425] According to one of the various embodiments, as illustrated in FIGS. 3C and 20, a designer ethanol-biodiesel-production pathway in a transgenic photosynthetic organism comprises: NADPH-dependent glyceraldehyde-3-phosphate dehydrogenase 34, NAD⁺-dependent glyceraldehyde-3-phosphate dehydrogenase 35, phosphoglycerate mutase 03, enolase 04, pyruvate kinase 05, pyruvate decarboxylase 108, alcohol dehydrogenase 44, and lipase 106.

[0426] According to one of the various embodiments, as illustrated in FIGS. 1 and 20, a designer butanol-biodiesel-production pathway in a transgenic photosynthetic organism comprises: NAD⁺-dependent glyceraldehyde-3-phosphate dehydrogenase 35, phosphoglycerate mutase 03, enolase 04, pyruvate kinase 05, pyruvate-ferredoxin oxidoreductase 06, acetyl-CoA acetyltransferase (or, thiolase 07), 3-hydroxybutyryl-CoA dehydrogenase 08, crotonase 09, trans-enoyl-CoA reductase (or butyryl-CoA dehydrogenase 10), butyraldehyde dehydrogenase (or aldehyde/alcohol dehydrogenase (AdhE2)) 11, butanol dehydrogenase 12, and lipase 106.

[0427] According to one of the various embodiments, as illustrated in FIGS. 4 and 20, a designer butanol-biodiesel-production pathway in a transgenic photosynthetic organism comprises: NADPH-dependent glyceraldehyde-3-phosphate dehydrogenase 34, NAD-dependent glyceraldehyde-3-phosphate dehydrogenase 35, phosphoglycerate mutase 03, enolase 04, phosphoenolpyruvate carboxylase 45, aspartate aminotransferase 46, aspartokinase 47, aspartate-semialdehyde dehydrogenase 48, homoserine dehydrogenase 49, homoserine kinase 50, threonine synthase 51, threonine ammonia-lyase 52, 2-isopropylmalate synthase 40, isopropylmalate isomerase 41, 3-isopropylmalate dehydrogenase 39, 2-keto acid decarboxylase 42, NAD-dependent alcohol dehydrogenase 43 (and/or NADPH-dependent alcohol dehydrogenase 44, or butanol dehydrogenase 12), and lipase 106.

[0428] According to one of the various embodiments, as illustrated in FIGS. 6 and 20, a designer isobutanol-biodiesel-production pathway in a transgenic photosynthetic organism comprises: NADPH-dependent glyceraldehyde-3-phosphate dehydrogenase 34, NAD-dependent glyceraldehyde-3-phosphate dehydrogenase 35, phosphoglycerate mutase 03, enolase 04, pyruvate kinase 05, acetolactate synthase 53, ketol-acid reductoisomerase 54, dihydroxy-acid dehydratase 55, 2-keto acid decarboxylase 42, NAD-dependent alcohol dehydrogenase 43 (or NADPH-dependent alcohol dehydrogenase 44), and lipase 106.

[0429] According to another embodiment, as illustrated in FIGS. 6 and 20, a designer 3-methyl-1-butanol-biodiesel-production pathway in a transgenic photosynthetic organism comprises: NADPH-dependent glyceraldehyde-3-phosphate dehydrogenase 34, NAD-dependent glyceraldehyde-3-phosphate dehydrogenase 35, phosphoglycerate mutase 03, enolase 04, pyruvate kinase 05, acetolactate synthase 53, ketol-acid reductoisomerase 54, dihydroxy-acid dehydratase 55, 2-isopropylmalate synthase 40, 3-isopropylmalate dehydratase 38, 3-isopropylmalate dehydrogenase 39, 2-keto acid decarboxylase 42, NAD-dependent alcohol dehydrogenase 43 (or NADPH-dependent alcohol dehydrogenase 44; or more preferably, 3-methylbutanal reductase 57), and lipase 106.

[0430] According to another embodiment, as illustrated in FIGS. 7 and 20, a designer hexanol-biodiesel-production pathway in a transgenic photosynthetic organism comprises: NADPH-dependent glyceraldehyde-3-phosphate dehydrogenase 34, NAD-dependent glyceraldehyde-3-phosphate dehydrogenase 35, phosphoglycerate mutase 03, enolase 04, pyruvate kinase 05, pyruvate-ferredoxin oxidoreductase 06, thiolase 07, 3-hydroxybutyryl-CoA dehydrogenase 08, crotonase 09, butyryl-CoA dehydrogenase 10, designer 3-ketothiolase 07′, designer 3-hydroxyacyl-CoA dehydrogenase 08′, designer enoyl-CoA dehydratase 09′, designer 2-enoyl-CoA reductase 10′, designer acyl-CoA reductase 11′, hexanol dehydrogenase 12′ and lipase 106.

[0431] According to another embodiment, as illustrated in FIGS. 8, 18 and 20, a designer transgenic alcohol (methanol, 1-pentanol, 1-hexanol, and/or 1-heptanol)-biodiesel-producing organism comprises a set of enzymes comprising at least one of the enzymes selected from the group consisting of lipase 106, formate dehydrogenase (FₐₜₑDH) 109, formaldehyde dehydrogenase (F_{ald}DH) 110, alcohol dehydrogenase (ADH) 43 (or 44), NADPH-dependent glyceraldehyde-3-phosphate dehydrogenase 34, NAD-dependent glyceraldehyde-3-phosphate dehydrogenase 35, phosphoglycerate mutase 03, enolase 04, pyruvate kinase 05, citramalate synthase 36, 2-methylmalate dehydratase 37, 3-isopropylmalate dehydratase 38, 3-isopropylmalate dehydrogenase 39, 2-isopropylmalate synthase 40, isopropylmalate isomerase 41, 3-isopropylmalate dehydrogenase 39, designer isopropylmalate synthase 40′, designer isopropylmalate isomerase 41′, designer 3-isopropylmalate dehydrogenase 39′, designer 2-keto acid decarboxylase 42′, short-chain alcohol dehydrogenase 43′, hexanol dehydrogenase 12′, designer isopropylmalate synthase 40″, designer isopropylmalate isomerase 41″, designer 3-isopropylmalate dehydrogenase 39″, designer 2-keto acid decarboxylase 42″, and designer short-chain alcohol dehydrogenase 43″.

[0432] According to another embodiment, as illustrated in FIGS. 9 and 20, a designer branched higher alcohols (3-methyl-1-pentanol, 4-methyl-1-hexanol, and/or 5-methyl-1-heptanol)-biodiesel-production pathway in a transgenic photosynthetic organism comprises: NADPH-dependent glyceraldehyde-3-phosphate dehydrogenase 34, NAD-dependent glyceraldehyde-3-phosphate dehydrogenase 35, phosphoglycerate mutase 03, enolase 04, pyruvate kinase 05, citramalate synthase 36, 2-methylmalate dehydratase 37, 3-isopropylmalate dehydratase 38, 3-isopropylmalate dehydrogenase 39, acetolactate synthase 53, ketol-acid reductoisomerase 54, dihydroxy-acid dehydratase 55, designer isopropylmalate synthase 40′, designer isopropylmalate isomerase 41′, designer 3-isopropylmalate dehydrogenase 39′, designer 2-keto acid decarboxylase 42′, short-chain alcohol dehydrogenase 43′, designer isopropylmalate synthase 40″, designer isopropylmalate isomerase 41″, designer 3-isopropylmalate dehydrogenase 39″, designer 2-keto acid decarboxylase 42″, designer short-chain alcohol dehydrogenase 43″, and lipase 106.

[0433] According to another embodiment, as illustrated in FIGS. 10 and 20, a designer branched-chain higher alcohols (4-methyl-1-pentanol, 5-methyl-1-hexanol, and 6-methyl-1-heptanol)-biodiesel-production pathway in a transgenic photosynthetic organism comprises: NADPH-dependent glyceraldehyde-3-phosphate dehydrogenase 34, NAD-dependent glyceraldehyde-3-phosphate dehydrogenase 35, phosphoglycerate mutase 03, enolase 04, pyruvate kinase 05, acetolactate synthase 53, ketol-acid reductoisomerase 54, dihydroxy-acid dehydratase 55, isopropylmalate synthase 40, dehydratase 38, 3-isopropylmalate dehydrogenase 39, designer isopropylmalate synthase 40′, designer isopropylmalate isomerase 41′, designer 3-isopropylmalate dehydrogenase 39′, designer 2-keto acid decarboxylase 42′, short-chain alcohol dehydrogenase 43′, designer isopropylmalate synthase 40″, designer isopropylmalate isomerase 41″, designer 3-isopropylmalate dehydrogenase 39″, designer 2-keto acid decarboxylase 42″, designer short-chain alcohol dehydrogenase 43″, and lipase 106.

[0434] According to one of the various embodiments, as illustrated in FIGS. 12, 13 and 19, a designer anaerobic hydrogenotrophic 1-butanol-biodiesel-production pathway in a transgenic organism comprises: energy converting hydrogenase (Ech) 91, [NiFe]-hydrogenase (Mvh) 95, Coenzyme F₄₂₀-reducing hydrogenase (Frh) 96, native (or heterologous) soluble hydrogenase (SH) 71, heterodissulfide reductase (Hdr) 94, formylmethanofuran dehydrogenase 83, formyl transferase 84, 10-methenyl-tetrahydromethanopterin cyclohydrolase 85, 10-methylene-H₄ methanopterin dehydrogenase 86, 10-methylene-H₄-methanopterin reductase 87, methyl-H₄-methanopterin: corrinoid iron-sulfur protein methyltransferase 88, corrinoid iron-sulfur protein 89, CO dehydrogenase/acetyl-CoA synthase 90, thiolase 07, 3-hydroxybutyryl-CoA dehydrogenase 08, crotonase 09, butyryl-CoA dehydrogenase 10, butyaldehyde dehydrogenase 11, butanol dehydrogenase 12 and/or alcohol dehydrogenase 43, and lipase 106.

[0435] According to one of the various embodiments, as illustrated in FIGS. 14 and 19, another designer anaerobic hydrogenotrophic 1-butanol-biodiesel-production pathway in a transgenic organism comprises: formate dehydrogenase 74, 10-formyl-H₄ folate synthetase 75, methenyltetrahydrofolate cyclohydrolase 76, 10-methylene-H₄ folate dehydrogenase 77, 10-methylene-H₄ folate reductase 78, methyl-H₄ folate: corrinoid iron-sulfur protein methyltransferase 79, corrinoid iron-sulfur protein 80, CO dehydrogenase/acetyl-CoA synthase 81, thiolase 07, 3-hydroxybutyryl-CoA dehydrogenase 08, crotonase 09, butyryl-CoA dehydrogenase 10, butyaldehyde dehydrogenase 11, butanol dehydrogenase 12, and/or alcohol dehydrogenase 43, and lipase 106.

[0436] SEQ ID NO: 205 presents example 205 of a designer nirA-promoter-controlled lipase DNA construct (1822 bp) that includes a PCR FD primer (sequence 1-20), a 231-bp nirA promoter from Thermosynechococcus elongatus BP1 (21-251), an enzyme-encoding sequence (252-1682) selected/modified from the sequences of a Pseudomonas fluorescens lipase (AAA25882) which can use butanol, a 120-bp rbcS terminator from BP1 (1683-1802), and a PCR RE primer (1803-1822) at the 3′ end.

[0437] SEQ ID NO: 206 presents example 206 of a designer nirA-promoter-controlled lipase DNA construct (1486 bp) that includes a PCR FD primer (sequence 1-20), a 231-bp nirA promoter from Thermosynechococcus elongatus BP1 (21-251), an enzyme-encoding sequence (252-1346) selected/modified from the sequences of a Burkholderia cepacia lipase (M58494) which can use ethanol, a 120-bp rbcS terminator from BP1 (1347-1466), and a PCR RE primer (1467-1486) at the 3′ end.

[0438] SEQ ID NO: 207 presents example 207 of a designer nirA-promoter-controlled Pyruvate Decarboxylase DNA construct (2098 bp) that includes a PCR FD primer (sequence 1-20), a 231-bp nirA promoter from Thermosynechococcus elongatus BP1 (21-251), an enzyme-encoding sequence (252-1958) selected/modified from the sequences of a Zymomonas mobilis Pyruvate Decarboxylase (AFN57569), a 120-bp rbcS terminator from BP1 (1959-2078), and a PCR RE primer (2079-2098) at the 3′ end.

[0439] Note, use of SEQ ID NOS. 205 and 58-70 in genetic transformation of a microbial host cell including (but not limited to) bacterial cells such as a cyanobacterium Thermosynechococcus elongatus creates a designer cyanobacterium such as designer Thermosynechococcus which comprises lipase and designer nirA-promoter-controlled Calvin-cycle-channeledl-butanol production pathway (as shown with numerical labels 34, 35, 03-05, and 36-43 in FIG. 4) for production of biodiesel from water and carbon dioxide (FIG. 20).

[0440] Similarly, the use of SEQ ID NOS. 206, 207,204, and 58-62 in a microbial host cell including (but not limited to) bacterial cells such as a cyanobacterium Thermosynechococcus elongatus represents a designer cyanobacterium such as designer Thermosynechococcus comprising designer lipase and Calvin-cycle-channeled ethanol-production pathways for production of biodiesel from water and carbon dioxide (FIG. 20). The photoautotrophic ethanol-biodiesel-production pathway comprises lipase 106, NADPH-dependent glyceraldehyde-3-phosphate dehydrogenase 34, NAD-dependent glyceraldehyde-3-phosphate dehydrogenase 35, phosphoglycerate mutase 03, enolase 04, pyruvate kinase 05, pyruvate decarboxylase 108, and alcohol dehydrogenase 44.

[0441] SEQ ID NO: 208 presents example 208 of a designer nirA-promoter-controlled Lipase DNA construct (1567 bp) that includes a PCR FD primer (sequence 1-20), a 89-bp Synechocystis sp. strain PCC 6803 nitrite-reductase nirA promoter (21-109), an enzyme-encoding sequence (110-1138) selected from a Candida antarctica Lipase (GenBank: CAA83122) which can use methanol, a 409-bp Synechocystis sp. PCC 6803 rbcS terminator (1139-1547), and a PCR RE primer (1548-1567).

[0442] Note, use of SEQ ID NOS. 208 and 199-201 in genetic transformation of a microbial host cell such as a cyanobacterium Synechocystis sp. strain PCC 6803 confers a designer methanol-biodiesel-production pathway (109, 110, 43/44, and 106 as numerically labeled in FIG. 18). This also represents an example of a designer Synechocystis for photoautotrophic production of alcohol (methanol) and biodiesel from CO₂ and H₂O and as illustrated in FIGS. 18 and 20.

[0443] SEQ ID NO: 209 presents example 209 of a designer hox-promoter-controlled Lipase DNA construct (2075 bp) that includes a PCR FD primer (sequence 1-20), a 172-bp Nostoc sp. strain PCC 7120 (Anabaena PCC 7120) hox promoter (21-192), an enzyme-encoding sequence (193-1623) selected/modified from the sequence of Lipase (GenBank: AAA25882) of Pseudomonas fluorescens, a 432-bp Nostoc sp. strain PCC 7120 gor terminator (1624-2055), and a PCR RE primer (2056-2075) at the 3′ end.

[0444] Note, use of SEQ ID NOS. 209 and 166-179 in genetic transformation of a microbial host cell including (but not limited to) bacterial cells such as a cyanobacterium Anabaena PCC 7120 can create a designer cyanobacterium such as designer Anabaena with lipase and a designer reductive-acetyl-CoA 1-butanol-production pathway (numerically labeled as 83-90 and 07-12 in FIG. 13) for production of biodiesel from molecular hydrogen (H₂) and carbon dioxide (CO₂) without requiring photosynthesis or sunlight. This also represents an example of a designer hydrogenotrophic cell for hydrogenotrophic production of alcohol (butanol) and biodiesel from H₂ and CO₂ as illustrated in FIG. 19.

[0445] SEQ ID NO: 210 presents example 210 of a designer Synechococcus sp. strain PCC 7942 nirA-promoter-controlled Lipase gene DNA construct (2290 base pairs (bp)) that includes a PCR FD primer (sequence by 1-20), a 88-bp nirA promoter (21-108) selected from the Synechococcus sp. strain PCC 7942 (freshwater cyanobacterium) nitrite-reductase-gene promoter sequence, an enzyme-encoding sequence (109-1962) selected and modified from a Pseudomonas fluorescens Lipase (GenBank accession number: BAC98499), a 308-bp Synechococcus sp. strain PCC 7942 rbcS terminator (1963-2270), and a PCR RE primer (2271-2290) at the 3′ end.

[0446] Note, in the designer transgenic Synechococcus that is represented by SEQ ID NOS: 210 and 95-98 (and/or 99), Synechococcus' native enzymes of 03-05, 36-41 and 45-52 are used in combination with the designer nirA-promoter-controlled enzymes of 34, 35, 42 and 12 [encoded by SEQ ID NOS: 95-98 (and/or 99)] to confer a designer lipase and the Calvin-cycle 3-phosphoglycerate-branched photosynthetic NADPH-enhanced pathways for photobiological production of 1-butanol from carbon dioxide and water (FIG. 4). The 1-butanol produced from carbon dioxide and water (FIG. 4) is used by the lipase (encoded by SEQ ID NO: 210) in the transesterification of triglyceride and/or fatty acid for production of biodiesel (FIG. 20).

[0447] SEQ ID NO:211 presents example 211 for a designer groE-promoter-controlled Lipase DNA construct (1231 bp) that includes a PCR FD primer (sequence 1-20), a 137-bp Prochlorococcus marinus MIT9313 heat- and light-responsive groE promoter (21-157), an enzyme-encoding sequence (158-1090) selected from a Brachybacterium tyrofermentans Lipase (GenBank: ACD89058), a 121-bp Prochlorococcus marinus MIT9313 rbcS terminator (1091-1213), and a PCR RE primer (1214-1231).

[0448] Use of Prochlorococcus marinus MIT 9313 as a host organism in genetic transformation with SEQ ID NOS: 211 and 110-122 can create a designer transgenic Prochlorococcus marinus for photobiological production of isobutanol and/or 3-methyl-1-butanol (FIG. 6), wherein the produced alcohol(s) is simultaneously and/or subsequently used by the lipase (encoded by SEQ ID NO: 211) in the transesterification of triglyceride and/or fatty acids for production of biodiesel (FIG. 20). Therefore, this also represents an example of a designer Prochlorococcus for photoautotrophic production of alcohols (isobutanol and/or 3-methyl-1-butanol) and biodiesel from CO₂ and H₂O and as illustrated in FIG. 20.

[0449] SEQ ID NO:212 presents example 212 for a designer nirA-promoter-controlled Lipase DNA construct (1386 bp) that includes a PCR FD primer (sequence 1-20), a 203-bp Cyanothece sp. ATCC 51142 nirA promoter (21-223), an enzyme-encoding sequence (224-1165) selected from a Rhodococcus erythropolis Lipase sequence (GenBank: ACD89059), a 201-bp Cyanothece sp. ATCC 51142 rbcS terminator (1166-1376), and a PCR RE primer (1377-1386).

[0450] Use of Cyanothece sp. ATCC 51142 as a host organism in genetic transformation with SEQ ID NOS: 212 and 123-128 can create a designer transgenic Cyanothece for photobiological production of 1-pentanol, 1-hexanol, and/or 1-heptanol (FIG. 8), wherein the produced alcohol(s) is simultaneously and/or subsequently used by the lipase (encoded by SEQ ID NO: 212) in the transesterification of triglyceride and/or fatty acids for production of biodiesel (FIG. 20).

[0451] SEQ ID NO. 213 presents example 213 of a designer Nia1-promoter-controlled chloroplast-targeted Lipase DNA construct (2420 bp) that includes a PCR FD primer (sequence 1-20), a 2×84-bp Chlamydomonas reinhardtii Nia1 (nitrate reductase) promoter (21-188), a 135-bp Chlamydomonas reinhardtii RbcS2 transit peptide (189-323), a Lipase-encoding sequence (324-2177) selected/modified from Pseudomonas sp. 7323 Lipase (CAJ76166), a 223-bp Chlamydomonas reinhardtii RbcS2 terminator (2178-2400), and a PCR RE primer (2401-2420).

[0452] Note, use of SEQ ID NOS. 213, 129-133, 151-153, 140 and 141 (or 142) in genetic transformation of an eukaryotic photosynthetic organism such as Chlamydomonas can create a designer eukaryotic photosynthetic organism such as designer Chlamydomonas with a Calvin-cycle 3-phosphogylcerate-branched NADPH-enhanced pathway (03-05, 34, 35, 53-55, 42, and 43 (44) in FIG. 6) for photobiological production of isobutanol from carbon dioxide and water, wherein the produced isobutanol is simultaneously and/or subsequently used by the lipase (encoded by SEQ ID NO: 213) in the transesterification of triglyceride and/or fatty acids for production of biodiesel (FIG. 20). Similarly, the use of SEQ ID NO: 213 and 1-12 in genetic transformation of an eukaryotic photosynthetic organism such as Chlamydomonas can create a designer eukaryotic photosynthetic organism such as designer Chlamydomonas with a glyceraldehydes-3-phosphate-branched butanol-production pathway (01-12 in FIG. 1), wherein the produced butanol is simultaneously and/or subsequently used by the lipase (encoded by SEQ ID NO: 213) in the transesterification of triglyceride and/or fatty acids for production of biodiesel (FIG. 20).

### Enhanced Evolution and Selection of Biofuel Alcohol-Producing Strains

[0453] According to one of the various embodiments, use of a biofuel alcohol-sensing responsive promoter regulatory system in combination of a selectable marker can enhance the screening for the transgenic cells with increased production of the target biofuels such as butanol and related higher alcohols. For example, the σ⁵⁴-transcriptional activator (BmoR) and a σ⁵⁴-dependent alcohol-regulated promoter (P_{BMO}) previously identified from Thauera butanivorans can be used as an example for such an alcohol-sensing responsive promoter regulatory system. It has been experimentally demonstrated that this BmoR-P_{BMO} genetic device can sense a wide range of the butanol and related higher alcohols concentrations and can thus be used as genetic switch to control the expression of a selectable marker (or designer gene) according to the concentration levels of the biofuel alcohols in bacteria such as E. coli. Therefore, in one of the various embodiments, this BmoR-P_{BMO} genetic device is used as an example to control the expression of a selectable marker gene selected from the group consisting of tetracycline resistance marker gene tetA, kanamycin resistance marker gene (kanr), gentamicin resistance marker gene, spectinomycin resistance marker gene Sper, streptomycin resistance aadA gene, ampicillin resistance marker gene amp^{r}, chloramphenicol resistance CmR gene, hygromycin resistance (hph) gene, glyphosate resistance genes epsps, argininosuccinate lyase (arg7) gene, nitrate reductase genes (narG and napA), and combinations thereof,

[0454] With the use of BmoR-P_{BMO} genetic switch in controlling the expression levels of a selectable marker such as tetracycline resistance marker gene tetA in responding to the concentrations of the product biofuel alcohols, only the most productive cells that produce sufficient amount of the biofuel alcohols which can turn on the BmoR-P_{BMO} genetic switch to express the selectable marker gene tetA will be able to survive in the presence of the antibiotic tetracycline in the culture medium. Therefore, this biofuel product-guided selection process through the use of an alcohol-sensing transcription regulator-coupled selection marker system can positively select better transgenic cells that possess more effective biofuel-production pathways. The selectable marker in this case does not have to be an antibiotic or herbicide resistance gene. Certain nutrient-related genes such as argininosuccinate lyase (arg7) gene or nitrate reductase genes (narG and napA) can also be used as a selectable marker for this biofuel alcohol-guided selection process, when certain auxotroph that lacks of the cognate argininosuccinate lyase (arg7) gene or nitrate reductase genes (narG and napA) is used as a host organism. A significant advantage of the biofuel-guided selection process is that it can eliminate the cheater cells that survive without producing the target biofuel molecule such as butanol and positively select the true biofuel (butanol) producer cells in an effective manner.

[0455] According to one of the various embodiments, this biofuel (alcohol) product-guided selection process is used in combination with a mutagenesis process including oligonucleotide-directed genome engineering to accelerate the molecular genetic evolution process in creating optimized biofuel-producing strains. It has been experimentally demonstrated that introduction of certain short (with a length range from about 80 to 100 bp) single-stranded DNA (ssDNA) or oligonucleotides (oligos) into certain host cells such as bacterial cells by electroporation can effectively create many mutations at many targeted locations in the host cell genomic DNA. In this approach, the oligos are directed to the lagging strand of the replication fork during DNA replication. Typically, these oligonucleotides are specially made so that the two end regions (30-40 bp) of each oligo are homologous to certain spots of the host chromosome, enabling them to bind with the lagging strand of the DNA replication fork at the targeted spots of the chromosome DNA for allelic replacements. The middle region of each oligo contains a designed mutation selected from the group consisting of mismatch, insertion and/or deletion. It is a preferred practice for each designer-made oligonucleotide to contain two phosphorothioated bases at its 3′ and 5′ terminals to increase the stability of the transforming oligonucleotide for higher allelic replacement efficiency. It is also a preferred practice to employ the bacteriophage-Red single-stranded DNA (ssDNA) binding protein β, which binds to ssDNA and promotes strand annealing, to mediate the recombineering process in the host cell for enhanced allelic replacement efficiency.

[0456] According to one of the various embodiments, use of the designer-made oligonucleotides can simultaneously target many different allelic DNA regions including the transcription regulatory regions, Shine-Dalgarno sequences and the proteins-encoding sequences in the host genome to generate large numbers (billions) of genetic variants for selection by biofuel product-guided selection process to obtain transgenic cells with optimized biofuel productivity. For example, the alcohol productivity may be dramatically optimized by simultaneously targeting the translational regulatory region such as the Shine-Dalgarno sequences of the biofuel-production-pathway genes for enhanced pathway activity while targeting the other competing pathway genes and/or their Shine-Dalgarno sequences for their reduced activity. Typically, in order for mRNA to be translated accurately, its sequence of codons must be brought into proper register with the translational apparatus which is the ribosomes. For example, in certain bacteria such as E. coli, the correct registration of mRNA on ribosome requires alignment of a pyrimidine-rich sequence on 3′-end of 16S RNA with a purine-rich part of 5′-end of mRNA. The purine-rich segment of mRNA is the ribosome-binding site also known as the Shine-Dalgarno sequence that is located typically within the first 18-bp upstream immediately from the initiation codon. In many cases where the ribosome-binding on the Shine-Dalgarno sequence positively regulate the translation efficiency, the designer mutation on the Shine-Dalgarno sequence should designed towards the canonical complementation with the 16S RNA's 3′-end pyrimidine-rich sequence to enhance translation efficiency for a given mRNA. It is now also known that in certain host cells such as cyanobacteria, the ribosome-binding on the Shine-Dalgarno sequence negatively regulate the translation efficiency. In that case, it is a preferred practice to mutate the Shine-Dalgarno sequence away from the canonical complementation with the 16S RNA's 3′-end pyrimidine-rich sequence to enhance translation efficiency for a given mRNA. Other genetic control devices such as riboswitches may also be employed with designer RNA aptamers for regulating designer transgene expression.

[0457] SEQ ID NO: 214 presents example 214 of a designer Synechocystis sp. PCC 6803 transcription factor-arginine-based alcohol-selection DNA construct (6498 bp) that includes a PCR FD primer (sequence 1-20), an alcohol-inducible σ⁵⁴-transcriptional promoter regulatory sequence (20-4683) selected/modified from a Thauera butanivorans transcription factor BmoR and its associated promoter regulatory sequence (AY093933), a selectable marker-encoding sequence (4684-6069) selected from a Synechocystis sp. PCC 6803 argininosuccinate lyase (GenBank: NP_{—}440604), a 409-bp Synechocystis sp. PCC 6803 rbcS terminator (6070-6478), and a PCR RE primer (6479-6498). Use of this DNA construct (SEQ ID NO: 214) enables enhanced evolution and selection for biofuel alcohol-producing designer Synechocystis cells based on arginine-nutrient complementation without requiring the use of any antibiotic resistance gene.

[0458] SEQ ID NO: 215 presents example 215 of a designer Thermosynechococcus elongatus transcription factor and nitrate reductase-based alcohol-selection DNA construct (7034 bp) that includes a PCR FD primer (sequence 1-20), an alcohol-inducible σ⁵⁴-transcriptional promoter regulatory sequence (20-4683) selected/modified from a Thauera butanivorans transcription factor BmoR and its associated promoter regulatory sequence (AY093933), a selectable marker-encoding sequence (4684-6884) selected from Thermosynechococcus elongatus BP-1 nitrate reductase (NP_{—}682145), a 120-bp rbcS terminator from BP1 (6885-7014), and a PCR RE primer (7015-7034) at the 3′ end. Use of this DNA construct (SEQ ID NO: 215) enables enhanced evolution and selection for biofuel alcohol-producing designer Thermosynechococcus cells through the use of nitrate-nutrient complementation without requiring the use of any antibiotic resistance gene.

[0459] SEQ ID NO: 216 presents example 216 of a designer Synechococcus sp. strain PCC 7942 transcription factor and Tetracycline resistance-based alcohol-selection and Lipase DNA construct (7006 base pairs (bp)) that includes a PCR FD primer (sequence by 1-20), an alcohol-inducible σ⁵⁴-transcriptional promoter regulatory sequence (20-4047) selected/modified from a Thauera butanivorans transcription factor BmoR and its associated promoter regulatory sequence (AY093933), a selection marker encoding sequence (4048-5247) selected from tetracycline resistance protein sequence (ΔGF38340), a lipase enzyme-encoding sequence (5248-6678) selected/modified from the sequences of a Pseudomonas fluorescens lipase (AAU10321) which can use butanol and ethanol, a 308-bp Synechococcus sp. strain PCC 7942 rbcS terminator (6679-6986), and a PCR RE primer (6987-7006) at the 3′ end. Use of this DNA construct (SEQ ID NO: 216) enables enhanced evolution and selection for alcohol-biodiesel producing designer Synechococcus cells with tetracycline resistance protein.

[0460] SEQ ID NO:217 presents example 217 for a designer Prochlorococcus marinus MIT9313 transcription factor and glyphosate tolerant protein-based alcohol-selection DNA construct (5556 bp) that includes a PCR FD primer (sequence 1-20), an alcohol-inducible σ⁵⁴-transcriptional promoter regulatory sequence (20-4047) selected/modified from a Thauera butanivorans transcription factor BmoR and its associated promoter regulatory sequence (AY093933), a selectable marker-encoding sequence (4048-5415) selected from a Glyphosate tolerant 5-enolpyruvylshikimate-3-phosphate synthase (GenBank: AEM75108), a 121-bp Prochlorococcus marinus MIT9313 rbcS terminator (5416-5536), and a PCR RE primer (5537-5556). Use of this DNA construct (SEQ ID NO: 217) enables enhanced evolution and selection for alcohol-producing designer Prochlorococcus cells with a Glyphosate tolerant 5-enolpyruvylshikimate-3-phosphate synthase.

[0461] SEQ ID NO:218 presents example 218 for a designer Cyanothece sp. ATCC 51142 transcription factor and nitrate reductase-based alcohol-selection DNA construct (6500 bp) that includes a PCR FD primer (sequence 1-20), an alcohol-inducible σ⁵⁴-transcriptional promoter regulatory sequence (20-4047) selected/modified from a Thauera butanivorans transcription factor BmoR and its associated promoter regulatory sequence (AY093933), a selectable marker-encoding sequence (4048-6279) selected from a Cyanothece sp. ATCC 51142 nitrate reductase sequence (GenBank: ACB50564), a 201-bp Cyanothece sp. ATCC 51142 rbcS terminator (6278-6480), and a PCR RE primer (6481-6500). Use of this DNA construct (SEQ ID NO: 218) enables enhanced evolution and selection for alcohol-producing designer Cyanothece cells based on nutrient (nitrate) complementation without requiring the use of any antibiotic resistance gene.

[0462] SEQ ID NO: 219 presents example 219 of a designer Anabaena PCC 7120 transcription factor and ketol-acid reductoisomerase/dihydroxy-acid dehydratase-based alcohol-selection DNA construct (7187 bp) that includes a PCR FD primer (sequence 1-20), an alcohol-inducible σ⁵⁴-transcriptional promoter regulatory sequence (20-4047) selected/modified from a Thauera butanivorans transcription factor BmoR and its associated promoter regulatory sequence (AY093933), a selectable marker-encoding sequence (4048-6735) selected/modified from an Anabaena PCC 7120 Ketol-acid reductoisomerase (GenBank: BAB74014) and an Anabaena PCC 7120 dihydroxy-acid dehydratase (NP_{—}486811), a 432-bp Nostoc sp. strain PCC 7120 gor terminator (6736-7167), and a PCR RE primer (7168-7187) at the 3′ end. Use of this DNA construct (SEQ ID NO: 219) enables enhanced evolution and selection for alcohol-producing designer Anabaena cells based on nutrients (valine, leucine and isoleucine) complementation without requiring the use of any antibiotic resistance gene.

[0463] SEQ ID NO: 220 presents example 220 of a designer Anabaena PCC 7120 transcription factor and argininosuccinate lyase-based alcohol-selection lipase DNA construct (5885 bp) that includes a PCR FD primer (sequence 1-20), an alcohol-inducible σ⁵⁴-transcriptional promoter regulatory sequence (20-4047) selected/modified from a Thauera butanivorans transcription factor BmoR and its associated promoter regulatory sequence (AY093933), a selectable marker-encoding sequence (4048-5433) selected from an Anabaena PCC 7120 argininosuccinate lyase (NP_{—}487927), a 432-bp Nostoc sp. strain PCC 7120 gor terminator (5434-5865), and a PCR RE primer (5866-5885) at the 3′ end. Use of this DNA construct (SEQ ID NO: 220) enables enhanced evolution and selection for alcohol-producing designer Anabaena cells based on arginine nutrient complementation without requiring any antibiotic resistance gene.

Creation of Authoxtrophs for Generating Transformants without Antibiotic Selection Marker

[0464] According to one of the various embodiments, special nutrient-based authoxtrophs are created by deletion of an essential “nutrient-gene” such as an essential arginine synthesis gene (argininosuccinate lyase (arg7)) which is required for making arginine, or ketol-acid reductoisomerase (54) and dihydroxy-acid dehydratase (55) which are required for making the precursors to synthesize valine, leucine and isoleucine, or a nitrate reductase gene which is essential to utilize the nitrate nutrient in host organisms. The deletion of an essential nutrient-gene can be achieved by putting an antibiotic selectable marker in the place of the essential nutrient-gene or by cutting it out. For example, the authoxtroph created by deletion of ketol-acid reductoisomerase (54) and dihydroxy-acid dehydratase (55) can grow only in a culture medium that is supplemented with valine, leucine and isoleucine. Similarly, the arginine-authoxtroph can grow only in a culture medium that is supplemented with arginine while the nitrate-authoxtroph which cannot reduce nitrate to make the needed ammonium can grow in an ammonium-supplemented minimal medium but cannot grow in a minimal medium with nitrate as the only nitrogen source. Therefore, the cognate argininosuccinate lyase (arg7) gene, nitrate reductase genes (narG and napA) or ketol-acid reductoisomerase (54) and dihydroxy-acid dehydratase (55) genes can be used as a selection marker based on nutrient-complementation using their corresponding authoxtrophs as host organisms in genetic transformation.

[0465] According to one of the various embodiments, when the DNA construct of the designer genes for the biofuel-production pathways are fully optimized and readily for commercial applications, the DNA construct is then fused with the cognate argininosuccinate lyase (arg7) gene or nitrate reductase genes (narG and napA) as the selection marker. The entire antibiotic selection marker in the authoxtroph host can then be removed through homologous recombination with the designer DNA construct fused with the cognate argininosuccinate lyase (arg7) gene or nitrate reductase genes (narG and napA) as the selectable marker. In this example, when the antibiotic selection marker is removed, the cognate argininosuccinate lyase (arg7) gene or nitrate reductase genes (narG and napA) is restored by the incorporation of the designer DNA construct into the host authoxtroph. This process results in a new transgenic strain that contains the desirable designer DNA construct of the fully optimized biofuel-production pathways genes without any antibiotic resistance selection marker for improved biosafety.

### Designer Expression of Positively Charged Polypeptides on Cellar Surfaces Enabling Self-Flocculation for Enhanced Harvesting of Microbial Cells

[0466] Harvesting of microalgae cells from a liquid culture is a significant technical challenge in achieving cost-effect algal biomass harvesting for production of biodiesel and valuable algal products. The technical difficulty largely stems from the fact that microbials such as algae and cyanobacteria are in micrometer sizes and their cell membranes typically contain negatively charges such as the negatively-charged head groups of phospholipids at the two sides of the cytoplasm membrane. The negative surface charges of microbial cells often keep them apart from each other, which present a serious problem in trying to harvest them from a liquid culture. According to one of the various embodiments, as shown in FIG. 20, this technical challenge is overcome by switchably expressing certain designer positively-charged polypeptides such as polylysine on the outside surfaces of the microbial cells to neutralize the cellular surface charges so that the cells can then aggregate together resulting in self-flocculation that can dramatically enhance the harvesting of microbial cells such as algae from liquid culture. The designer positively-charged polypeptides for expression on microbial cell surfaces are selected from the group consisting of polypeptides rich in lysine residuals, polypeptides rich in arginine residues, polypeptides rich in histidine residues, polypeptides rich in lysine and arginine residues, polypeptides rich in lysine and histidine residues, polypeptides rich in lysine and arginine and histidine residues, lipase-fused polylysine, polyamine-lipase-fused polylysine, lipase-fused positively-charged polypeptides, fluorescent protein-lipase-fused polylysine, fluorescent protein-lipase-fused positively-charged polypeptides, and/or combinations thereof

[0467] According to one of the various embodiments, the designer DNA sequence of a positively-charged polypeptide is fused with the gene of a natural cell surface protein with synthetic biology. The wild-type microalgae cells with negatively charged cell surfaces repel each other forming stable suspension. The designer expression of positively charged polypeptides on cellar surfaces is used to destabilize suspension via charge neutralization. The electrostatically destabilized algal cells in the liquid culture medium come together due to Van der Waals forces of attraction. In cases of polyamine-type polypeptides such as polylysine, the long chain molecules facilitate aggregation by the mechanism called bridging, through which the polylysine chains across link with the neighboring cells by electrostatic charge attraction and neutralization

[0468] According to one of the various embodiments, the designer positively-charged polypeptide is fused with a designer lipase and/or a green-fluorescent protein for inducible expression on microbial cell surface. For example, when the microbial cell culture such as microalgae liquid culture is grown and ready for biodiesel production, the designer gene encoding for a positively-charged polypeptide fused with lipase and/or green-fluorescent protein is then expressed on the host cell surface. The green-fluorescent protein serves as a reporter that can be readily visualized under a light microscope. The induced expression of designer positively-charged polypeptide on cell surface leads to self-flocculation for enhanced algal biomass harvesting. The lipase expressed on cell surface is perfect for use as a biocatalyst for transesterification of algal lipids and/or other vegetable oils, animal fats, waste cooking oils to produce biodiesel.

[0469] SEQ ID NO. 221 presents example 221 of a designer Nia1-promoter-controlled cell surface ZYS1-like protein-polyamine-polylysine DNA construct (1479 bp) that includes a PCR FD primer (sequence 1-20), a 2×84-bp Chlamydomonas reinhardtii Nia1 (nitrate reductase) promoter (21-188), a 418-bp (189-627) Chlamydomonas reinhardtii cell surface ZYS1-like protein (XP_{—}001700395), a 481-bp polyamine-encoding sequence (628-1153) selected/modified from Streptococcus salivarius polyamine-type protein (CAJ76166), a 90-bp synthetic polylysine-encoding sequence plus a stop codon (1154-1246), a 223-bp Chlamydomonas reinhardtii RbcS2 terminator (1247-1459), and a PCR RE primer (1460-1479).

[0470] SEQ ID NO. 222 presents example 222 of a designer Nia1-promoter-controlled cell surface ZYS1-like protein-polyamine-linked Lipase-polylysine DNA construct (2717 bp) that includes a PCR FD primer (sequence 1-20), a 2×84-bp Chlamydomonas reinhardtii Nia1 (nitrate reductase) promoter (21-188), a 598-bp (189-839) Chlamydomonas reinhardtii cell surface fasciclin-like protein (XP_{—}001698887), a 478-bp polyamine-encoding sequence (840-1355) selected/modified from Streptococcus salivarius polyamine-type protein (CAJ76166), a Lipase sequence (1356-2381) selected/modified from Candida antarctica Lipase (CAA83122), a 90-bp synthetic polylysine-encoding sequence plus a stop codon (2382-2474), a 223-bp Chlamydomonas reinhardtii RbcS2 terminator (2475-2697), and a PCR RE primer (2698-2717).

[0471] SEQ ID NO. 223 presents example 223 of a designer Nia1-promoter-controlled cell surface ZYS1-like protein-polyamine-lipase-polyamine-polylysine DNA construct (3617 bp) that includes a PCR FD primer (sequence 1-20), a 2×84-bp Chlamydomonas reinhardtii Nia1 (nitrate reductase) promoter (21-188), a 598-bp (189-839) Chlamydomonas reinhardtii cell surface fasciclin-like protein (XP_{—}001698887), a 478-bp polyamine-encoding sequence (840-1355) selected/modified from Streptococcus salivarius polyamine-type protein (CAJ76166), a Lipase sequence (1356-2447) selected/modified from Burkholderia cepacia Lipase (M58494), a polyamine sequence (2448-3281) selected/modified from Mycoplasma bovis polyamine ABC protein (ADR25157), a 90-bp synthetic polylysine-encoding sequence plus a stop codon (3282-3374), a 223-bp Chlamydomonas reinhardtii RbcS2 terminator (3375-3597), and a PCR RE primer (3598-3617).

[0472] SEQ ID NO. 224 presents example 224 of a designer Nia1-promoter-controlled cell surface ZYS1-like protein-lipase-polyamine-polylysine DNA construct (2687 bp) that includes a PCR FD primer (sequence 1-20), a 2×84-bp Chlamydomonas reinhardtii Nia1 (nitrate reductase) promoter (21-188), a 601-bp (189-839) Chlamydomonas reinhardtii cell surface fasciclin-like protein (XP_{—}001698887), a Lipase sequence (840-1931) selected/modified from Burkholderia cepacia Lipase (M58494), a polylysine-type sequence (1932-2351) selected/modified from Rhodnius prolixus polylysine protein (AAQ20830), a 90-bp synthetic polylysine-encoding sequence plus a stop codon (2352-2454), a 223-bp Chlamydomonas reinhardtii RbcS2 terminator (2455-2667), and a PCR RE primer (2668-2687).

[0473] Note, the use of SEQ ID NO. 221 in genetic transformation of an eukaryotic photosynthetic organism such as Chlamydomonas can create a designer eukaryotic alga such as designer Chlamydomonas, wherein the algal cells in their liquid culture can inducibly self-flocculate for enhanced harvesting of algal biomass upon induction of the designer Nia1-promoter-controlled cell surface ZYS1-like protein-polyamine-polylysine (encoded by SEQ ID NO: 221). For example, in an ammonium-based minimal medium, this designer Chlamydomonas can grow photoautotrophically just like a wild-type organism using air CO₂ as the sole carbon source. When the designer Chlamydomonas culture is grown and ready for algal biomass harvesting, the expression of the designer Nia1-promoter-controlled cell surface ZYS1-like protein-polyamine-polylysine (encoded by SEQ ID NO: 221) is induced by addition of nitrate into the liquid culture medium (owning to the use of Nia1 promoter in controlling the designer gene expression). The induced expression of the designer Nia1-promoter-controlled cell surface ZYS1-like protein-polyamine-polylysine (encoded by SEQ ID NO: 221) soon leads to self-flocculation that greatly enhance the harvesting of algal biomass from liquid culture.

[0474] Similarly, using any of the SEQ ID NOS. 222, 223 or 224 in genetic transformation of an eukaryotic alga such as Chlamydomonas can create a designer eukaryotic alga such as designer Chlamydomonas, wherein the algal cells in their mass liquid culture can inducibly self-flocculate for enhanced harvesting of algal biomass upon the express of the designer cell surface-linked Lipase-polylysine (encoded by SEQ ID NO: 222, 223 or 224). In this example, a lipase is fused with a cell surface protein and a polylysine for expression on the cell surface together with the fused long polylysine tail as shown in FIG. 20. The lipase enzyme expressed in this manner on the surfaces of algal cells is perfect for use as a catalyst for transesterification of not only algal lipids, but also other vegetable oils, waste cooking oils, and/or animal fats to produce biodiesel as disclosed above. Therefore, the co-expression of lipase-polylysine on algal cell surfaces produces great value for enhanced algal biomass harvesting and catalytic biodiesel production.

[0475] Consequently, the use of SEQ ID NOS. 221, 129-133, 151-153, 140 and 141 (or 142) in an eukaryotic alga host organism such as Chlamydomonas constitutes a designer transgenic eukaryotic alga such as designer Chlamydomonas with a Calvin-cycle 3-phosphogylcerate-branched NADPH-enhanced pathway (03-05, 34, 35, 53-55, 42, and 43 (44) in FIG. 6) for photobiological production of isobutanol from carbon dioxide and water, wherein the algal cells in their mass liquid culture can inducibly self-flocculate for enhanced harvesting of algal biomass upon induction of the designer Nia1-promoter-controlled cell surface ZYS1-like protein-polyamine (encoded by SEQ ID NO: 221). Similarly, the use of SEQ ID NO: 222 (and/or 223 or 204), 213 and 1-12 in an eukaryotic photosynthetic host organism such as Chlamydomonas constitutes another designer eukaryotic alga such as designer Chlamydomonas with a glyceraldehydes-3-phosphate-branched butanol-production pathway (01-12 in FIG. 1), wherein the produced butanol is simultaneously and/or subsequently used by the lipase (encoded by SEQ ID NO: 213) in transesterification of triglyceride and/or fatty acids for production of biodiesel. Furthermore, the algal cells in their mass liquid culture can inducibly self-flocculate for enhanced harvesting of algal biomass upon induction of the designer Nia1-promoter-controlled cell surface ZYS1-like protein-polyamine-linked Lipase-polylysine (encoded by SEQ ID NO: 222 (and/or 223 or 204)) as illustrated in FIG. 20. The lipase enzyme expressed in this manner on the surfaces of algal cells here is also perfect for use as a catalyst for transesterification of algal lipids, other vegetable oils, waste cooking oils, and/or animal fats to produce biodiesel as disclosed above.

[0476] Similarly, the expression of designer Nia1-promoter-controlled cell surface-linked polyamine-linked Lipase-polylysine (encoded by SEQ ID NO: 222 (and/or 223 or 204)) in other eukaryotic algae such as Botryococcus braunii, or Scenedesmus obliquus represents a designer eukaryotic alga such as designer Botryococcus, or designer Scenedesmus, wherein the algal cells in their mass liquid culture can inducibly self-flocculate for enhanced harvesting of algal biomass upon the express of the designer cell surface-linked Lipase-polylysine (encoded by SEQ ID NO: 222, 223 or 224). Furthermore, the expression of designer Nia1-promoter-controlled cell surface-linked polyamine-linked Lipase-polylysine (encoded by SEQ ID NO: 222 (and/or 223 or 204)) in combination of a designer alcohol-biodiesel-production pathway such as the designer methanol-biodiesel-production pathway (109, 110, 43/44, and 106 as numerically labeled in FIG. 18) in a host eukaryotic alga such as Botryococcus braunii, or Scenedesmus obliquus represents designer alcohol-biodiesel-production alga with the capability of self-flocculation. According to one of the various embodiments, the eukaryotic algae for use as host organisms in genetic transformation with designer DNA constructs to enable self-flocculation and biodiesel production are selected from the group consisting of: Chlamydomonas reinhardtii, Platymonas subcordiformis, Chlorella fusca, Chlorella sorokiniana, Chlorella vulgaris, ‘Chlorella’ ellipsoidea, Chlorella spp., Dunaliella salina, Dunaliella viridis, Dunaliella bardowil, Haematococcus pluvialis; Parachlorella kessleri, Betaphycus gelatinum, Chondrus crispus, Cyanidioschyzon merolae, Cyanidium caldarium, Galdieria sulphuraria, Gelidiella acerosa, Gracilaria changii, Kappaphycus alvarezii, Porphyra miniata, Ostreococcus tauri, Porphyra yezoensis, Porphyridium sp., Palmaria palmata, Gracilaria spp., Isochrysis galbana, Kappaphycus spp., Laminaria japonica, Laminaria spp., Monostroma spp., Nannochloris bacillaris, Nannochloris sp., Nannochloropsis oculata, Porphyra spp., Porphyridium spp., Undaria pinnatifida, Ulva lactuca, Ulva spp., Undaria spp., Phaeodactylum Tricornutum, Navicula saprophila, Crypthecodinium cohnii, Cylindrotheca fusiformis, Cyclotella cryptica, Euglena gracilis, Amphidinium sp., Symbiodinium microadriaticum, Macrocystis pyrifera, Ankistrodesmus braunii, Ankistrodesmus convolutus, Ankistrodesmus falcatus, Ankistrodesmus stipitatus, Botryococcus braunii, Pavlova salina, Pavlova lutheri, Scenedesmus vacuolatus, Scenedesmus acutus, Scenedesmus rotundus, Scenedesmus dimorphus, Scenedesmus sp. Ki4, Scenedesmus sp. LU4, Scenedesmus quadricaudus, and Scenedesmus obliquus.

[0477] SEQ ID NO: 225 presents example 225 of a designer nirA-promoter-controlled cell-surface-linked Green fluorescent protein-Lipase-polylysine DNA construct (3205 bp) that includes a PCR FD primer (sequence 1-20), a 89-bp Synechocystis sp. strain PCC 6803 nitrite-reductase nirA promoter (21-109), a cell surface protein sequence (110-508) selected from a Synechocystis sp. PCC 6803 secreted protein MPB70 sequence (BAA17432), a 714-bp (509-1222) Green fluorescent protein sequence (ACY56286); an enzyme-encoding sequence (1223-2398) selected from a Rhizopus oryzae Lipase (GenBank: ACW84344) that can use methanol, a polylysine-type sequence (2399-2683) selected from Trichomonas vaginalis G3 polylysine protein sequence (XP_{—}001291750), a 90-bp synthetic polylysine-encoding sequence plus a stop codon (2684-2776), a 409-bp Synechocystis sp. PCC 6803 rbcS terminator (2778-3185), and a PCR RE primer (3186-3205).

[0478] Note, the use of SEQ ID NO. 225 in in genetic transformation of a photosynthetic organism such as Synechocystis sp. strain PCC 6803 can create a designer cyanobacterium such as designer Synechocystis, wherein the cyanobacterial cells in their mass liquid culture can inducibly self-flocculate for enhanced harvesting of their biomass upon induction of the designer nirA-promoter-controlled cell-surface-linked Green fluorescent protein-Lipase-polylysine (encoded by SEQ ID NO: 225). The green fluorescent protein enables convenient visualization of the fused protein expressed on the cell surface under a light microscope. The lipase enzyme expressed in this manner on the surfaces of cyanobacterial cells here is perfect for use as a catalyst for transesterification of not only cyanobacteria lipids, but also for transesterification of other algae oils, vegetable oils, waste cooking oils, and/or animal fats to produce biodiesel as disclosed above. Consequently, the use of SEQ ID NOS. 225, 208 and 199-201 in a microbial host cell such as a cyanobacterium Synechocystis sp. strain PCC 6803 constitutes a designer Synechocystis with a methanol-biodiesel-production pathway (109, 110, 43/44 and 106 in FIG. 18), wherein the cyanobacterial cells in liquid culture can inducibly self-flocculate for enhanced harvesting of their biomass upon induction of the designer nirA-promoter-controlled cell-surface-linked Green fluorescent protein-Lipase-polylysine (encoded by SEQ ID NO: 225).

[0479] SEQ ID NO: 226 presents example 226 of a designer nirA-promoter-controlled cell surface-linked lipase-polylysine DNA construct (2062 bp) that includes a PCR FD primer (sequence 1-20), a 231-bp nirA promoter from Thermosynechococcus elongatus BP1 (21-251), a cell surface protein sequence (252-551) selected from the first 300-bp of Thermosynechococcus elongatus BP-1 glycosyltransferase (NP_{—}681159), an enzyme-encoding sequence (552-1424) selected/modified from the sequences of a Thermomyces lanuginosus lipase (ABV69592) which can use methanol and ethanol, a polylysine-type sequence (1425-1709) selected from Trichomonas vaginalis G3 polylysine protein sequence (XP_{—}001291750), a positively charged peptide sequence (1710-1829) selected from Tobacco mosaic virus Charged protein (NP_{—}597749), a 90-bp synthetic polylysine-encoding sequence plus a stop codon (1830-1922), a 120-bp rbcS terminator from BP1 (1923-2042), and a PCR RE primer (2043-2062) at the 3′ end.

[0480] Note, the use of SEQ ID NO. 226 in in genetic transformation of a photosynthetic organism such Thermosynechococcus elongatus can create a designer cyanobacterium such as designer Thermosynechococcus, wherein the thermophilic cyanobacterial cells in their liquid culture can inducibly self-flocculate for enhanced harvesting of their biomass upon the expression of the designer nirA-promoter-controlled cell surface-linked lipase-polylysine (encoded by SEQ ID NO: 226). The thermotolerant lipase enzyme expressed in this manner on the surfaces of cyanobacterial cells here is perfect for use as a catalyst for transesterification of cyanobacteria lipids, other algae oils, vegetable oils, waste cooking oils, and/or animal fats to produce biodiesel as disclosed above. Consequently, the use of SEQ ID NOS. 226, 206, 207, 204, and 58-62 in a microbial host cell including (but not limited to) bacterial cells such as a cyanobacterium Thermosynechococcus elongatus represents a designer cyanobacterium such as designer Thermosynechococcus with a photoautotrophic ethanol-biodiesel-production pathway (FIG. 20), wherein the thermophilic cyanobacterial cells in their mass liquid culture can inducibly self-flocculate for enhanced harvesting of their biomass upon the expression of the designer nirA-promoter-controlled cell surface-linked lipase-polylysine (encoded by SEQ ID NO: 226).

[0481] SEQ ID NO: 227 presents example 227 of a designer Arthrospira platensis cell surface-linked Lipase-polylysine DNA construct (2053 bp) that includes a PCR FD primer (sequence 1-20), a cell surface protein sequence (21-662) selected from Arthrospira platensis NIES-39 fasciclin domain protein (YP_{—}005067833), an enzyme-encoding sequence (663-1545) selected/modified from the sequences of a Thermomyces lanuginosus lipase (ABV69592) which can use methanol and ethanol, a polylysine-type sequence (1546-1820) selected from Trichomonas vaginalis G3 polylysine protein sequence (XP_{—}001291750), a positively charged peptide sequence (1821-1940) selected from Tobacco mosaic virus Charged protein (NP_{—}597749), a 90-bp synthetic polylysine-encoding sequence plus a stop codon (1941-2033), and a PCR RE primer (2034-2053) at the 3′ end.

[0482] SEQ ID NO: 228 presents example 228 of a designer Arthrospira platensis cell surface-linked Lipase-GFP-polylysine DNA construct (2971 bp) that includes a PCR FD primer (sequence 1-20), a cell surface protein sequence (21-419) selected from Arthrospira platensis beta-Ig-H3/fasciclin (EKD10810), an enzyme-encoding sequence (420-1319) selected/modified from the sequences of an Enterobacter aerogenes lipase (KHM31672) which can use methanol, a green-fluorescent protein sequence (1320-2033) selected from GFP sequence (ΔGT40311), a polylysine-type sequence (2034-2453) selected from Rhodnius prolixus polylysine protein sequence (AAQ20830), a polylysine-type sequence (2454-2738) selected from Trichomonas vaginalis G3 polylysine protein sequence (XP_{—}001291750), a positively charged peptide sequence (2739-2858) selected from Tobacco mosaic virus Charged protein (NP_{—}597749), a 90-bp synthetic polylysine-encoding sequence plus a stop codon (2859-2951), and a PCR RE primer (2952-2971) at the 3′ end.

[0483] Note, the use of SEQ ID NO. 227 in genetic transformation of a photosynthetic organism such Arthrospira platensis can create a designer cyanobacterium such as designer Arthrospira platensis, wherein the cyanobacterial cells in their mass liquid culture can inducibly self-flocculate for enhanced harvesting of their biomass upon the expression of the designer Arthrospira platensis cell surface-linked Lipase-polylysine (encoded by SEQ ID NO: 227). The lipase enzyme expressed in this manner on the surfaces of cyanobacterial cells here is perfect for use as a catalyst for transesterification of not only cyanobacteria lipids, but also other algae oils, vegetable oils, waste cooking oils, and/or animal fats to produce biodiesel as disclosed above. Similarly, the use of SEQ ID NO. 228 in a microbial host cell including (but not limited to) bacterial cells such as a cyanobacterium Arthrospira platensis represents a designer cyanobacterium such as designer Arthrospira, wherein the cyanobacterial cells in their mass liquid culture can inducibly self-flocculate for enhanced harvesting of their biomass upon the expression of the of a designer Arthrospira platensis cell surface-linked Lipase-GFP-polylysine (encoded by SEQ ID NO: 228). [0482] SEQ ID NO: 229 presents example 229 of a designer Phaeodactylum tricornutum cell surface-linked Lipase-polylysine DNA construct (2524 bp) that includes a PCR FD primer (sequence 1-20), a cell surface protein sequence (21-806) selected from Phaeodactylum tricornutum cell surface protein (EEC44540), an enzyme-encoding sequence (807-1706) selected/modified from the sequences of an Enterobacter aerogenes lipase (KHM31672) which can use methanol, a polylysine-type sequence (1708-2126) selected from Rhodnius prolixus polylysine protein sequence (AAQ20830), a polylysine-type sequence (2127-2411) selected from Trichomonas vaginalis G3 polylysine protein sequence (XP_{—}001291750), a 90-bp synthetic polylysine-encoding sequence plus a stop codon (2412-2504), and a PCR RE primer (2505-2524) at the 3′ end.

[0484] Note, the use of SEQ ID NO. 229 in a photosynthetic host organism such as diatom Phaeodactylum tricornutum represents a designer diatom such as designer Phaeodactylum, wherein the cyanobacterial cells in their mass liquid culture can inducibly self-flocculate for enhanced harvesting of their biomass upon the expression of the designer Phaeodactylum tricornutum cell surface-linked Lipase-polylysine (encoded by SEQ ID NO: 229). The lipase enzyme expressed in this manner on the surfaces of diatom cells here is perfect for use as a catalyst for transesterification of not only diatom lipids, but also other algae oils, vegetable oils, waste cooking oils, and/or animal fats to produce biodiesel as disclosed above.

[0485] SEQ ID NO: 230 presents example 230 of a designer desert cyanobacterium Microcoleus vaginatu cell surface-linked Lipase-polylysine DNA construct (2317 bp) that includes a PCR FD primer (sequence 1-20), a cell surface protein sequence (21-599) selected from a desert cyanobacterium Microcoleus vaginatu beta-Ig-H3/fasciclin (EGK87709), an enzyme-encoding sequence (600-1499) selected/modified from the sequences of a Enterobacter aerogenes lipase (KHM31672) which can use methanol, a polylysine-type sequence (1500-1919) selected from Rhodnius prolixus polylysine protein sequence (AAQ20830), a polylysine-type sequence (1920-2204) selected from Trichomonas vaginalis G3 polylysine protein sequence (XP_{—}001291750), a 90-bp synthetic polylysine-encoding sequence plus a stop codon (2205-2297), and a PCR RE primer (2298-2317) at the 3′ end.

[0486] Note, the use of SEQ ID NO. 230 in a photosynthetic host organism such as Microcoleus vaginatu represents a designer cyanobacterium such as designer Microcoleus, wherein the desert cyanobacterial cells in their mass liquid culture can inducibly self-flocculate for enhanced harvesting of their biomass upon the expression of the designer Microcoleus vaginatu cell surface-linked Lipase-polylysine (encoded by SEQ ID NO: 230). The lipase enzyme expressed in this manner on the cell surfaces is perfect for use as a catalyst for transesterification of not only blue-green algae lipids, but also other algae oils, vegetable oils, waste cooking oils, and/or animal fats to produce biodiesel as disclosed above.

[0487] SEQ ID NO: 231 presents example 231 of a designer Methanosarcina barkeri cell surface-linked Lipase-polylysine DNA construct (4552 bp) that includes a PCR FD primer (sequence 1-20), a cell surface protein sequence (21-2834) selected from Methanosarcina barkeri cell surface protein (YP_{—}306783), an enzyme-encoding sequence (2835-3734) selected/modified from the sequences of a Enterobacter aerogenes lipase (KHM31672) which can use methanol, a polylysine-type sequence (3735-4154) selected from Rhodnius prolixus polylysine protein sequence (AAQ20830), a polylysine-type sequence (4152-4439) selected from Trichomonas vaginalis G3 polylysine protein sequence (XP_{—}001291750), a 90-bp synthetic polylysine-encoding sequence plus a stop codon (4440-4532), and a PCR RE primer (4533-4552) at the 3′ end.

[0488] Note, the use of SEQ ID NO. 231 in a methanogen host organism such as Methanosarcina barkeri which can grow hydrogenotrophically using H₂ and CO₂ represents a designer hydrogenotrophic bacterium such as designer Methanosarcina, wherein the hydrogenotrophic bacterial cells in their mass liquid culture can inducibly self-flocculate for enhanced harvesting of their biomass upon the expression of the designer Methanosarcina barkeri cell surface-linked Lipase-polylysine (encoded by SEQ ID NO: 231). Since Methanosarcina can grow hydrogenotrophically using H₂ and CO₂ as the energy and carbon sources, the use of SEQ ID NO. 231 (lipase) in combination of formate dehydrogenase (FₐₜₑDH) 109, formaldehyde dehydrogenase (F_{ald}DH) 110, and alcohol dehydrogenase (ADH) 43 (or 44) (encoded by designer genes such as SEQ ID NOS. 199-201 or 202-204) constitutes a designer hydrogenotrophic organism for production of biodiesel from H₂ and CO₂ through the designer methanol-biodiesel-production pathway (FIGS. 18 and 19). Furthermore, the lipase enzyme expressed in this manner on the cell surfaces is perfect for use as a catalyst for transesterification of not only hydrogenotrophic bacterial lipids, but also algal oils, vegetable oils, waste cooking oils, and/or animal fats to produce biodiesel as disclosed above.

[0489] SEQ ID NO: 232 presents example 232 of a designer Synechococcus sp. strain PCC 7942 nirA-promoter-controlled cell surface-linked Lipase-polylysine DNA construct (2533 base pairs (bp)) that includes a PCR FD primer (sequence by 1-20), a 88-bp nirA promoter (21-108) selected from the Synechococcus sp. strain PCC 7942 (freshwater cyanobacterium) nitrite-reductase-gene promoter sequence, a cell surface protein sequence (109-507) selected from Synechococcus elongatus PCC 7942 Beta-Ig-H3/fasciclin (ABB58124), a lipase enzyme-encoding sequence (508-1407) selected/modified from the sequences of a Enterobacter aerogenes lipase (KHM31672) which can use methanol, a polylysine-type sequence (1408-1827) selected from Rhodnius prolixus polylysine protein sequence (AAQ20830), a polylysine-type sequence (1828-2112) selected from Trichomonas vaginalis G3 polylysine protein sequence (XP_{—}001291750), a 90-bp synthetic polylysine-encoding sequence plus a stop codon (2113-2205), a 308-bp Synechococcus sp. strain PCC 7942 rbcS terminator (2206-2513), and a PCR RE primer (2514-2533) at the 3′ end.

[0490] Note, the use of SEQ ID NO. 232 in a photosynthetic host organism such as Synechococcus sp. strain PCC 7942 represents a designer cyanobacterium such as designer Synechococcus, wherein the cyanobacterial cells in their mass liquid culture can inducibly self-flocculate for enhanced harvesting of their biomass upon the expression of the designer Synechococcus sp. strain PCC 7942 nirA-promoter-controlled cell surface-linked Lipase-polylysine (encoded by SEQ ID NO: 232). The lipase enzyme expressed in this manner on the cell surfaces is perfect for use as a catalyst for transesterification of not only blue-green algae lipids, but also other algae oils, vegetable oils, waste cooking oils, and/or animal fats to produce biodiesel as disclosed above. Consequently, the use of SEQ ID NO. 232 in combination of SEQ ID NOS: 210 and 95-98 (and/or 99) in a photosynthetic host organism such as Synechococcus sp. strain PCC 7942 represents another designer cyanobacterium such as designer Synechococcus with the Calvin-cycle 3-phosphoglycerate-branched photosynthetic NADPH-enhanced butanol-biodiesel-production pathways as illustrated in FIGS. 4 and 20, wherein the cyanobacterial cells in their mass liquid culture can inducibly self-flocculate for enhanced harvesting of their biomass upon the expression of the designer Synechococcus sp. strain PCC 7942 nirA-promoter-controlled cell surface-linked Lipase-polylysine (encoded by SEQ ID NO: 232).

[0491] While the present invention has been illustrated by description of several embodiments and while the illustrative embodiments have been described in considerable detail, it is not the intention of the applicant to restrict or in any way limit the scope of the appended claims to such detail. Additional advantages and modifications will readily appear to those skilled in the art. The invention in its broader aspects is therefore not limited to the specific details, representative apparatus and methods, and illustrative examples shown and described. Accordingly, departures may be made from such details without departing from the spirit or scope of applicant's general inventive concept.

What is claimed is:

1. A method for autotrophic production of alcohols and biodiesel comprising:
introducing a transgenic autotrophic organism into a reactor system, the transgenic autotrophic organism comprising transgenes coding for a set of enzymes to confer a photoautotrophic or a hydrogenotrophic pathway for production of alcohol and biodiesel;
using a photosynthetic or hydrogenotrophic process in the biological reactor to synthesize the alcohol and biodiesel from carbon dioxide and water;
using a product separation process to harvest the synthesized alcohol and biodiesel from the bioreactor; and
harvesting biomass from liquid culture in the bioreactor with self-flocculation wherein the designer transgenic cells in their mass liquid culture inducibly self-flocculate for enhanced harvesting of their biomass upon the expression of the designer cell surface-linked positively charged polypeptides.

2. The method of claim 1, wherein the transgenic autotrophic organism comprises at least one of a transgenic designer plant, plant cell, alga, blue-green alga, cyanobacterium, or bacterial cell selected from the group consisting of blue-green algae (oxyphotobacteria including cyanobacteria and oxychlorobacteria), hydrogenotrophic bacteria, fermentative bacteria, methanogens, aquatic plants, plant cells, green algae, red algae, brown algae, diatoms, marine algae, freshwater algae, salt-tolerant algal strains, cold-tolerant algal strains, heat-tolerant algal strains, antenna-pigment-deficient mutants, butanol-tolerant algal strains, higher-alcohols-tolerant algal strains, butanol-tolerant oxyphotobacteria, butanol-tolerant hydrogenotrophic bacteria and methanogens, higher-alcohols-tolerant oxyphotobacteria, alcohol-tolerant hydrogenotrophic bacteria, alcohol-tolerant fermentative bacteria, biodiesel-tolerant algae, biodiesel-tolerant cyanobacteria, biodiesel-tolerant fermentative bacteria, and biodiesel-tolerant hydrogenotrophic bacteria, alcohol-tolerant and biodiesel-tolerant algae, alcohol-tolerant and biodiesel-tolerant cyanobacteria, alcohol-tolerant and biodiesel-tolerant fermentative bacteria, alcohol-tolerant and biodiesel-tolerant hydrogenotrophic bacteria, and alcohol-tolerant and biodiesel-tolerant methanogens.

3. The method of claim 1, wherein the transgenic autotrophic organism comprises eukaryotic algae, blue-green algae (oxyphotobacteria including cyanobacteria and oxychlorobacteria) and bacteria selected from the group consisting of Chlamydomonas reinhardtii, Platymonas subcordiformis, Chlorella fusca, Chlorella sorokiniana, Chlorella vulgaris, ‘Chlorella’ ellipsoidea, Chlorella spp., Dunaliella salina, Dunaliella viridis, Dunaliella bardowil, Haematococcus pluvialis; Parachlorella kessleri, Betaphycus gelatinum, Chondrus crispus, Cyanidioschyzon merolae, Cyanidium caldarium, Galdieria sulphuraria, Gelidiella acerosa, Gracilaria changii, Kappaphycus alvarezii, Porphyra miniata, Ostreococcus tauri, Porphyra yezoensis, Porphyridium sp., Palmaria palmata, Gracilaria spp., Isochrysis galbana, Kappaphycus spp., Laminaria japonica, Laminaria spp., Monostroma spp., Nannochloris bacillaris, Nannochloris sp., Nannochloropsis oculata, Porphyra spp., Porphyridium spp., Undaria pinnatifida, Ulva lactuca, Ulva spp., Undaria spp., Phaeodactylum Tricornutum, Navicula saprophila, Crypthecodinium cohnii, Cylindrotheca fusiformis, Cyclotella cryptica, Euglena gracilis, Amphidinium sp., Symbiodinium microadriaticum, Macrocystis pyrifera, Ankistrodesmus braunii, Ankistrodesmus convolutus, Ankistrodesmus falcatus, Ankistrodesmus stipitatus, Pavlova salina, Pavlova lutheri, Botryococcus braunii, Scenedesmus vacuolatus, Scenedesmus acutus, Scenedesmus rotundus, Scenedesmus dimorphus, Scenedesmus sp. Ki4, Scenedesmus sp. LU4, Scenedesmus quadricaudus, Scenedesmus obliquus, Thermosynechococcus elongatus BP-1, Nostoc sp. PCC 7120, Synechococcus elongatus PCC 6301, Syncechococcus sp. strain PCC 7942, Syncechococcus sp. strain PCC 7002, Syncechocystis sp. strain PCC 6803, Prochlorococcus marinus MED4, Prochlorococcus marinus MIT 9313, Prochlorococcus marinus NATL1A, Prochlorococcus SS120, Spirulina platensis (Arthrospira platensis), Spirulina pacifica, Lyngbya majuscule, Anabaena sp., Synechocystis sp., Synechococcus elongates, Synechococcus (MC-A), Trichodesmium sp., Richelia intracellularis, Synechococcus WH7803, Synechococcus WH8102, Nostoc punctiforme, Syncechococcus sp. strain PCC 7943, Synechocyitis PCC 6714 phycocyanin-deficient mutant PD-1, Cyanothece strain 51142, Cyanothece sp. CCY0110, Oscillatoria limosa, Lyngbya majuscula, Symploca muscorum, Gloeobacter violaceus, Prochloron didemni, Prochlorothrix hollandica, Synechococcus (MC-A), Trichodesmium sp., Richelia intracellularis, Prochlorococcus marinus, Prochlorococcus SS120, Synechococcus WH8102, Lyngbya majuscula, Symploca muscorum, Synechococcus bigranulatus, cryophilic Oscillatoria sp., Phormidium sp., Nostoc sp.-1, Calothrix parietina, thermophilic Synechococcus bigranulatus, Synechococcus lividus, thermophilic Mastigocladus laminosus, Chlorogloeopsis fritschii PCC 6912, Synechococcus vulcanus, Synechococcus sp. strain MA4, Synechococcus sp. strain MA19, Methanocella paludicola SANAE, Acinetobacter baumannii ABNIH3, Acinetobacter baumannii ABNIH4, Acinetobacter sp. DR1, Agrobacterium sp. H13-3; Agrobacterium vitis S4, Alcaligenes sp., Allochromatium vinosum DSM 180, Amycolatopsis mediterranei 5699, Anoxybacillus flavithermus WK1, Aquifex aeolicus VF5, Archaeoglobus fulgidus DSM 4304, Archaeoglobus veneficus SNP6, Azospirillum sp. B510, Burkholderia cenocepacia HI2424, Caldicellulosiruptor bescii DSM 6725, Carboxydothermus hydrogenoformans, Centipeda periodontii DSM 2778, Clostridium autoethanogenum, Clostridium ragsdalei, Clostridium sticklandii DSM 519, Clostridium sticklandii, Corynebacterium glutamicum, Cupriavidus metallidurans CH34, Cupriavidus necator N-1, Desulfobacca acetoxidans DSM 11109, Exiguobacterium sp. AT1b, Ferrimonas balearica DSM 9799, Ferroglobus placidus DSM 10642, Geobacillus kaustophilus HTA426, Helicobacter bilis ATCC 43879, Herbaspirillum seropedicae SmR1, Hydrogenobacter thermophilus TK-6, Hydrogenovibrio marinus, Klebsiella variicola At-22, Methanobacterium sp. SWAN-1, Methanobrevibacter ruminantium M1, Methanocaldococcus fervens AG86, Methanocaldococcus infernus ME, Methanocaldococcus jannaschii, Methanocaldococcus sp. FS406-22, Methanocaldococcus vulcanius M7, Methanococcus aeolicus Nankai-3, Methanococcus maripaludis C6, Methanococcus maripaludis S2, Methanococcus voltae A3, Methanocorpusculum labreanum Z, Methanoculleus marisnigri JR1, Methanohalophilus mahii DSM 5219, Methanolinea tarda NOBI-1, Methanoplanus petrolearius DSM 11571, Methanoplanus petrolearius, Methanopyrus kandleri AV19, Methanoregula boonei 6A8, Methanosaeta harundinacea 6Ac, Methanosalsum zhilinae DSM 4017, Methanosarcina acetivorans C2A, Methanosarcina barkeri str. Fusaro, Methanosarcina mazei Go1, Methanosphaera stadtmanae, Methanospirillum hungatei JF-1, Methanothermobacter marburgensis str. Marburg, Methanothermobacter marburgensis, Methanothermobacter thermautotrophicus, Methanothermococcus okinawensis IH1, Methanothermus fervidus DSM 2088, Methylobacillus flagellates, Methylobacterium organophilum, Methylococcus capsulatus, Methylomicrobium kenyense, Methylomonas methanica MC09, Methylomonas sp. LW13, Methylosinus sp. LW2, Methylosinus trichosporium OB3b, Methylotenera mobilis JLW8, Methylotenera versatilis 301, Methylovorus glucosetrophus SIP3-4, Moorella thermoacetica ATCC 39073, Moorella thermoacetica, Oligotropha carboxidovorans OM5, Paenibacillus terrae HPL-003, Pelotomaculum thermopropionicum SI, Planctomyces brasiliensis DSM 5305, Pyrococcus furiosus DSM 3638, Pyrococcus horikoshii OT3, Pyrococcus yayanosii CHJ, Ralstonia eutropha H16, Rubrivivax sp., Selenomonas noxia ATCC 43541, Shewanella baltica BA175, Stenotrophomonas sp. SKA14, Synechococcus sp. JA-2-3B′a(2-13), Synechococcus sp. JA-3-3Ab, Thermococcus gammatolerans EJ3, Thermococcus kodakarensis KOD1, Thermococcus onnurineus NA1, Thermococcus sp. 4557, Thermodesulfatator indicus DSM 15286, Thermofilum pendens Hrk 5, Thermotoga lettingae TMO, Thermotoga petrophila RKU-1, Thiocapsa roseopersicina, Thiomonas intermedia K12, Xanthobacter autotrophicus, Yersinia pestis Antigua, Thermosynechococcus elongatus, Phaeodactylum tricornutum, Methanosarcina barkeri, and Microcoleus vaginatu.

4. The method of claim 1, wherein said transgenic autotrophic organism comprises a set of designer genes that express a designer photoautotrophic methanol-biodiesel production pathway comprising: NADPH-dependent glyceraldehyde-3-phosphate dehydrogenase, NAD⁺-dependent glyceraldehyde-3-phosphate dehydrogenase, formate dehydrogenase, formaldehyde dehydrogenase, alcohol dehydrogenase, and lipase.

5. The method of claim 1, wherein said transgenic autotrophic organism comprises a set of designer genes that express a designer hydrogenotrophic methanol-biodiesel production pathway comprising: NAD-reducing soluble hydrogenase, formate dehydrogenase, formaldehyde dehydrogenase, alcohol dehydrogenase, and lipase.

6. The method of claim 1, wherein said transgenic autotrophic organism comprises a set of designer genes that express a designer photoautotrophic ethanol-biodiesel-production pathway comprising: NADPH-dependent glyceraldehyde-3-phosphate dehydrogenase, NAD⁺-dependent glyceraldehyde-3-phosphate dehydrogenase, phosphoglycerate mutase, enolase, pyruvate kinase, pyruvate decarboxylase, alcohol dehydrogenase, and lipase.

7. The method of claim 1, wherein said transgenic autotrophic organism comprises a set of designer genes that express a designer photoautotrophic butanol-biodiesel-production pathway comprising: NAD⁺-dependent glyceraldehyde-3-phosphate dehydrogenase, phosphoglycerate mutase, enolase, pyruvate kinase, pyruvate-ferredoxin oxidoreductase, acetyl-CoA acetyltransferase, thiolase, 3-hydroxybutyryl-CoA dehydrogenase, crotonase, trans-enoyl-CoA reductase, butyryl-CoA dehydrogenase, butyraldehyde dehydrogenase, aldehyde/alcohol dehydrogenase (AdhE2), butanol dehydrogenase, and lipase.

8. The method of claim 1, wherein said transgenic autotrophic organism comprises a set of designer genes that express a designer photoautotrophic butanol-biodiesel-production pathway comprising: NADPH-dependent glyceraldehyde-3-phosphate dehydrogenase, NAD-dependent glyceraldehyde-3-phosphate dehydrogenase, phosphoglycerate mutase, enolase, phosphoenolpyruvate carboxylase, aspartate aminotransferase, aspartokinase, aspartate-semialdehyde dehydrogenase, homoserine dehydrogenase, homoserine kinase, threonine synthase, threonine ammonia-lyase, 2-isopropylmalate synthase, isopropylmalate isomerase, 3-isopropylmalate dehydrogenase, 2-keto acid decarboxylase, NAD-dependent alcohol dehydrogenase, NADPH-dependent alcohol dehydrogenase, butanol dehydrogenase, and lipase.

9. The method of claim 1, wherein said transgenic autotrophic organism comprises a set of designer genes that express a designer photoautotrophic isobutanol-biodiesel-production pathway comprising: NADPH-dependent glyceraldehyde-3-phosphate dehydrogenase, NAD-dependent glyceraldehyde-3-phosphate dehydrogenase, phosphoglycerate mutase, enolase, pyruvate kinase, acetolactate synthase, ketol-acid reductoisomerase, dihydroxy-acid dehydratase, 2-keto acid decarboxylase, NAD-dependent alcohol dehydrogenase, NADPH-dependent alcohol dehydrogenase, and lipase.

10. The method of claim 1, wherein said transgenic autotrophic organism comprises a set of designer genes that express a designer photoautotrophic 3-methyl-1-butanol-biodiesel-production pathway comprising: NADPH-dependent glyceraldehyde-3-phosphate dehydrogenase, NAD-dependent glyceraldehyde-3-phosphate dehydrogenase, phosphoglycerate mutase, enolase, pyruvate kinase, acetolactate synthase, ketol-acid reductoisomerase, dihydroxy-acid dehydratase, 2-isopropylmalate synthase, 3-isopropylmalate dehydratase, 3-isopropylmalate dehydrogenase, 2-keto acid decarboxylase, NAD-dependent alcohol dehydrogenase, NADPH-dependent alcohol dehydrogenase, 3-methylbutanal reductase, and lipase.

11. The method of claim 1, wherein said transgenic autotrophic organism comprises a set of designer genes that express a designer anaerobic hydrogenotrophic 1-butanol-biodiesel-production pathway comprising: energy converting hydrogenase, [NiFe]-hydrogenase, Coenzyme F₄₂₀-reducing hydrogenase, soluble hydrogenase, heterodissulfide reductase, formylmethanofuran dehydrogenase, formyl transferase, 10-methenyl-tetrahydromethanopterin cyclohydrolase, 10-methylene-H₄ methanopterin dehydrogenase, 10-methylene-H₄-methanopterin reductase, methyl-H₄-methanopterin: corrinoid iron-sulfur protein methyltransferase, corrinoid iron-sulfur protein, CO dehydrogenase/acetyl-CoA synthase, thiolase, 3-hydroxybutyryl-CoA dehydrogenase, crotonase, butyryl-CoA dehydrogenase, butyaldehyde dehydrogenase, butanol dehydrogenase, alcohol dehydrogenase, and lipase.

12. The method of claim 1, wherein said transgenic autotrophic organism comprises a set of designer genes that express a designer anaerobic hydrogenotrophic 1-butanol-biodiesel-production pathway comprising: formate dehydrogenase, 10-formyl-H₄ folate synthetase, methenyltetrahydrofolate cyclohydrolase, 10-methylene-H₄ folate dehydrogenase, 10-methylene-H₄ folate reductase, methyl-H₄ folate: corrinoid iron-sulfur protein methyltransferase, corrinoid iron-sulfur protein, CO dehydrogenase/acetyl-CoA synthase, thiolase, 3-hydroxybutyryl-CoA dehydrogenase, crotonase, butyryl-CoA dehydrogenase, butyaldehyde dehydrogenase, butanol dehydrogenase, alcohol dehydrogenase, and lipase.

13. The method of claim 1, wherein said transgenic autotrophic organism comprises a set of designer genes that express a designer autotrophic methanol-production pathway comprising formate dehydrogenase, formaldehyde dehydrogenase, and alcohol dehydrogenase (ADH).

14. The method of claim 1, wherein a biofuel alcohol-sensing responsive transcription regulatory system is used in combination with a selectable marker to enhance the screening for the transgenic cells with increased production of a target biofuel selected from the group consisting of butanol and related higher alcohols.

15. The method of claim 1, wherein:
the transgenic autotrophic organism comprises at least one of a transgenic photosynthetic plant, a transgenic photosynthetic cell, a transgenic alga, a transgenic blue-green alga, a transgenic cyanobacterium, and a transgenic bacterium comprising at least one of a designer photosynthetic pathway and a hydrogenotrophic pathway for autotrophic production of the alcohol; and the alcohol is selected from the group consisting of methanol, ethanol, propanol, 1-butanol, 2-methyl-1-butanol, isobutanol, 3-methyl-1-butanol, 1-hexanol, 1-octanol, 1-pentanol, 1-heptanol, 3-methyl-1-pentanol, 4-methyl-1-hexanol, 5-methyl-1-heptanol, 4-methyl-1-pentanol, 5-methyl-1-hexanol, 6-methyl-1-heptanol and combinations thereof.

16. The method of claim 1, wherein said alcohol is simultaneously and/or subsequently utilized by a lipase in transesterification of triglyceride and fatty acids for production of biodiesel.

17. The method of claim 1, wherein the set of enzymes comprises at least one of the enzymes selected from the group consisting of lipase, formate dehydrogenase (FₐₜₑDH), formaldehyde dehydrogenase (F_{ald}DH), alcohol dehydrogenase (ADH), NADPH-dependent glyceraldehyde-3-phosphate dehydrogenase, NAD-dependent glyceraldehyde-3-phosphate dehydrogenase, phosphoglycerate mutase, enolase, pyruvate kinase, citramalate synthase, 2-methylmalate dehydratase, 3-isopropylmalate dehydratase, 3-isopropylmalate dehydrogenase, 2-isopropylmalate synthase, isopropylmalate isomerase, 3-isopropylmalate dehydrogenase, designer isopropylmalate synthase, designer isopropylmalate isomerase, designer 3-isopropylmalate dehydrogenase, designer 2-keto acid decarboxylase, short-chain alcohol dehydrogenase, hexanol dehydrogenase, designer isopropylmalate synthase, designer isopropylmalate isomerase, designer 3-isopropylmalate dehydrogenase, designer 2-keto acid decarboxylase, and designer short-chain alcohol dehydrogenase.

18. The method of claim 1, wherein said designer transgenic autotrophic organism is made free of any antibiotic resistance genes for better biosafety by using nutrient-complementation selection with special authoxtrophs that are generated by deletion of an essential nutrient-gene selected from the group consisting of argininosuccinate lyase (arg7), nitrate reductase, ketol-acid reductoisomerase and dihydroxy-acid dehydratase.

19. The method of claim 1, wherein the said designer positively-charged polypeptides expressed on transgenic microbial cell surfaces are selected from the group consisting of polypeptides rich in lysine residuals, polypeptides rich in arginine residues, polypeptides rich in histidine residues, polypeptides rich in lysine and arginine residues, polypeptides rich in lysine and histidine residues, polypeptides rich in lysine and arginine and histidine residues, lipase-fused polylysine, polyamine-lipase-fused polylysine, lipase-fused positively-charged polypeptides, fluorescent protein-lipase-fused polylysine, and fluorescent protein-lipase-fused positively-charged polypeptides.

20. The method of claim 1, wherein the transgenic autotrophic organism comprises a biosafety-guarded feature selected from the group consisting of a designer proton-channel gene inducible under pre-determined inducing conditions, a designer cell-division-cycle iRNA gene inducible under pre-determined inducing conditions, a high-CO₂-requiring mutant, and highly thermophilic organism as a host organism for transformation with designer biofuel-production-pathway genes in creating designer cell-division-controllable autotrophic organisms, and combinations thereof; and wherein said transgenic autotrophic organism comprises a set of designer genes exemplified with exemplary designer DNA constructs of SEQ ID NOS. 1-232 shown in the sequence listings for expressing at least one of the proteins selected from the group consisting of: lipase, formate dehydrogenase (FₐₜₑDH), formaldehyde dehydrogenase (F_{ald}DH), alcohol dehydrogenase (ADH), NADPH-dependent glyceraldehyde-3-phosphate dehydrogenase, NAD⁺-dependent glyceraldehyde-3-phosphate dehydrogenase, phosphoglycerate mutase, enolase, pyruvate kinase, pyruvate decarboxylase, alcohol dehydrogenase, enolase, pyruvate kinase, pyruvate-ferredoxin oxidoreductase, acetyl-CoA acetyltransferase, thiolase, 3-hydroxybutyryl-CoA dehydrogenase, crotonase, trans-enoyl-CoA reductase, butyryl-CoA dehydrogenase, butyraldehyde dehydrogenase, aldehyde/alcohol dehydrogenase, butanol dehydrogenase, phosphoenolpyruvate carboxylase, aspartate aminotransferase, aspartokinase, aspartate-semialdehyde dehydrogenase, homoserine dehydrogenase, homoserine kinase, threonine synthase, threonine ammonia-lyase, 2-isopropylmalate synthase, isopropylmalate isomerase, 3-isopropylmalate dehydrogenase, 2-keto acid decarboxylase, NADPH-dependent alcohol dehydrogenase, NADPH-dependent alcohol dehydrogenase, butanol dehydrogenase, acetolactate synthase, ketol-acid reductoisomerase, dihydroxy-acid dehydratase, 2-keto acid decarboxylase, NAD-dependent alcohol dehydrogenase, NADPH-dependent alcohol dehydrogenase, acetolactate synthase, ketol-acid reductoisomerase, dihydroxy-acid dehydratase, 2-isopropylmalate synthase, 3-isopropylmalate dehydratase, 3-isopropylmalate dehydrogenase, 2-keto acid decarboxylase, NAD-dependent alcohol dehydrogenase, NADPH-dependent alcohol dehydrogenase, 3-methylbutanal reductase, oxygen-tolerant soluble hydrogenase (SH), oxygen-tolerant membrane bound hydrogenase (MBH), energy converting hydrogenase (Ech), methyl-H4MPT: coenzyme-M methyltransferase (Mtr), methyl-coenzyme M reductase (Mcr), heterodissulfide reductase (Hdr), [NiFe]-hydrogenase (Mvh), Coenzyme F₄₂₀-reducing hydrogenase (Frh), A₁Aₒ-ATP synthase, formate dehydrogenase, 10-formyl-H₄ folate synthetase, methenyltetrahydrofolate cyclohydrolase, 10-methylene-H₄ folate dehydrogenase, 10-methylene-H₄ folate reductase, methyl-H₄ folate: corrinoid iron-sulfur protein methyltransferase, corrinoid iron-sulfur protein, CO dehydrogenase/acetyl-CoA synthase, formylmethanofuran dehydrogenase, formyl transferase, 10-methenyl-tetrahydromethanopterin cyclohydrolase, 10-methylene-H₄ methanopterin dehydrogenase, 10-methylene-H₄-methanopterin reductase, methyl-H₄-methanopterin: corrinoid iron-sulfur protein methyltransferase, corrinoid iron-sulfur protein, CO dehydrogenase/acetyl-CoA synthase, thiolase, 3-hydroxybutyryl-CoA dehydrogenase, crotonase, butyryl-CoA dehydrogenase, butyaldehyde dehydrogenase, butanol dehydrogenase, 2-keto acid decarboxylase, alcohol dehydrogenase, 2-methylbutyraldehyde reductase, 3-methylbutanal reductase, hexanol dehydrogenase, octanol dehydrogenase, short-chain alcohol dehydrogenase, and designer positively-charged polypeptides expressed on transgenic microbial cell surfaces selected from the group consisting of polypeptides rich in lysine residuals, polypeptides rich in arginine residues, polypeptides rich in histidine residues, polypeptides rich in lysine and arginine residues, polypeptides rich in lysine and histidine residues, polypeptides rich in lysine and arginine and histidine residues, lipase-fused polylysine, polyamine-lipase-fused polylysine, lipase-fused positively-charged polypeptides, fluorescent protein-lipase-fused polylysine, and fluorescent protein-lipase-fused positively-charged polypeptides.

The application's sequence listing, which the Patent Office published only in electronic form, follows.

SEQUENCE LISTING (232 sequences)

SEQ ID NO: 1 - DNA, 1809 bp, Artificial Sequence
  Synthetic Construct- Sequence No. 1, Example 1: designer Butanol-Dehydrogenase DNA construct (1809 bp)
agaaaatctggcaccacacctatatggtagggtgcgagtgaccccgcgcgacttggagctcgatggccccgggttgtttggggcgtccgcctctcgcgctattctgagctggagaccgaggcgcatgaaaatgcattcgcttccataggacgctgcattgtggcttgaaggttcaagggaagggttcaaacgaccccgccgtacgaacttttgtcggggggcgctcccggccccgggctcttgtgcgcgcattagggcttcgggtcgcaagcaagacgatacatggccgccgtcattgccaagtcctccgtctccgcggccgtggctcgcccggcccgctccagcgtgcgccccatggccgcgctgaagcccgccgtcaaggctgcccccgtggctgccccggctcaggccaaccagatggagaattttagatttaatgcatatacagagatgctttttggaaagggacaaatagagaagcttccagaggttttaaaaagatatggtaaaaatatattacttgcatatggtggtggaagtataaaaaagaatggactctatgatactatccaaaagctattgaaagattttaatattgttgaattaagtggtattgaaccaaatccaagaattgaaactgtaagacgtggagttgaactttgcagaaaaaataaagtagatgttattttagctgttggtggagggagtacaatagactgctcaaaggttataggggcaggttattattatgctggagatgcatgggaccttgtaaaaaatccagctaaaataggtgaggttttaccaatagtgacagttttaacaatggcagctactggttctgaaatgaatagaaatgctgttatttcaaagatggatacaaatgaaaagcttggaacaggatcacctaagatgatccctcaaacttctattttagatccagaatatttgtatacattgccagcaattcaaacagctgcaggttgtgctgatattatgtcacacatatttgaacaatattttaataaaactacagatgcttttgtacaagataaatttgcggaaggtttgttgcaaacttgtataaaatattgccctgttgctttaaaggaaccaaagaattatgaagctagagcaaatataatgtgggctagttcaatggctcttaacggacttttaggaagtgggaaagctggagcttggacttgtcatccaatagaacatgaattaagtgcattttatgatataactcatggagtaggtcttgcaattttaactccaagttggatgagatatatcttaagtgatgtaacagttgataagtttgttaacgtatggcatttagaacaaaaagaagataaatttgctcttgcaaatgaagcaatagatgcaacagaaaaattctttaaagcttgtggtattccaatgactttaactgaacttggaatagataaagcaaactttgaaaagatggcaaaagctgcagtagaacatggtgctttagaatatgcatatgtttcattaaatgccgaggatgtatataaaattttagaaatgtccctttaataaatggaggcgctcgttgatctgagccttgccccctgacgaacggcggtggatggaagatactgctctcaagtgctgaagcggtagcttagctccccgtttcgtgctgatcagtctttttcaacacgtaaaaagcggaggagttttgcaattttgttggttgtaacgatcctccgttgattttggcctctttctccatgggcgggctgggcgtatttgaagcggttctctcttctgccgtta

SEQ ID NO: 2 - DNA, 2067 bp, Artificial Sequence
  Synthetic Construct- Sequence No. 2, Example 2: designer Butyraldehyde-Dehydrogenase DNA construct (2067 bp)
agaaaatctggcaccacacctatatggtagggtgcgagtgaccccgcgcgacttggagctcgatggccccgggttgtttggggcgtccgcctctcgcgctattctgagctggagaccgaggcgcatgaaaatgcattcgcttccataggacgctgcattgtggcttgaaggttcaagggaagggttcaaacgaccccgccgtacgaacttttgtcggggggcgctcccggccccgggctcttgtgcgcgcattagggcttcgggtcgcaagcaagacgatacatggccgccgtcattgccaagtcctccgtctccgcggccgtggctcgcccggcccgctccagcgtgcgccccatggccgcgctgaagcccgccgtcaaggctgcccccgtggctgccccggctcaggccaaccagatgattaaagacacgctagtttctataacaaaagatttaaaattaaaaacaaatgttgaaaatgccaatctaaagaactacaaggatgattcttcatgtttcggagttttcgaaaatgttgaaaatgctataagcaatgccgtacacgcacaaaagatattatcccttcattatacaaaagaacaaagagaaaaaatcataactgagataagaaaggccgcattagaaaataaagagattctagctacaatgattcttgaagaaacacatatgggaagatatgaagataaaatattaaagcatgaattagtagctaaatacactcctgggacagaagatttaactactactgcttggtcaggagataacgggcttacagttgtagaaatgtctccatatggcgttataggtgcaataactccttctacgaatccaactgaaactgtaatatgtaatagtataggcatgatagctgctggaaatactgtggtatttaacggacatccaggcgctaaaaaatgtgttgcttttgctgtcgaaatgataaataaagctattatttcatgtggtggtcctgagaatttagtaacaactataaaaaatccaactatggactctctagatgcaattattaagcacccttcaataaaactactttgcggaactggagggccaggaatggtaaaaaccctcttaaattctggtaagaaagctataggtgctggtgctggaaatccaccagttattgtagatgatactgctgatatagaaaaggctggtaagagtatcattgaaggctgttcttttgataataatttaccttgtattgcagaaaaagaagtatttgtttttgagaacgttgcagatgatttaatatctaacatgctaaaaaataatgctgtaattataaatgaagatcaagtatcaaagttaatagatttagtattacaaaaaaataatgaaactcaagaatactctataaataagaaatgggtcggaaaagatgcaaaattattcttagatgaaatagatgttgagtctccttcaagtgttaaatgcataatctgcgaagtaagtgcaaggcatccatttgttatgacagaactcatgatgccaatattaccaattgtaagagttaaagatatagatgaagctattgaatatgcaaaaatagcagaacaaaatagaaaacatagtgcctatatttattcaaaaaatatagacaacctaaataggtttgaaagagaaatcgatactactatctttgtaaagaatgctaaatcttttgccggtgttggttatgaagcagaaggctttacaactttcactattgctggatccactggtgaaggaataacttctgcaagaaattttacaagacaaagaagatgtgtactcgccggttaataaatggaggcgctcgttgatctgagccttgccccctgacgaacggcggtggatggaagatactgctctcaagtgctgaagcggtagcttagctccccgtttcgtgctgatcagtctttttcaacacgtaaaaagcggaggagttttgcaattttgttggttgtaacgatcctccgttgattttggcctctttctccatgggcgggctgggcgtatttgaagcggttctctcttctgccgtta

SEQ ID NO: 3 - DNA, 1815 bp, Artificial Sequence
  Synthetic Construct- Sequence No. 3, Example 3: designer Butyryl-CoA-Dehydrogenase DNA construct (1815 bp)
agaaaatctggcaccacacctatatggtagggtgcgagtgaccccgcgcgacttggagctcgatggccccgggttgtttggggcgtccgcctctcgcgctattctgagctggagaccgaggcgcatgaaaatgcattcgcttccataggacgctgcattgtggcttgaaggttcaagggaagggttcaaacgaccccgccgtacgaacttttgtcggggggcgctcccggccccgggctcttgtgcgcgcattagggcttcgggtcgcaagcaagacgatacctcgagcatatggccgccgtcattgccaagtcctccgtctccgcggccgtggctcgcccggcccgctccagcgtgcgccccatggccgcgctgaagcccgccgtcaaggctgcccccgtggctgccccggctcaggccaaccagatgaatttccaattaactagagaacaacaattagtacaacaaatggttagagaattcgcagtaaatgaagttaagccaatagctgctgaaatcgacgaaacagaaagattccctatggaaaacgttgaaaaaatggctaagcttaaaatgatgggtatcccattttctaaagaatttggtggagcaggcggagatgttctttcatatataatagctgtggaagaattatcaaaagtttgtggtactacaggagttattctttcagcgcatacatcattatgtgcatcagtaattaatgaaaatggaactaacgaacaaagagcaaaatatttacctgatctttgcagcggtaaaaagatcggtgctttcggattaactgaaccaggtgctggtacagatgctgcaggacaacaaacaactgctgtattagaaggggatcattatgtattaaatggttcaaaaatcttcataacaaatggtggagttgctgaaactttcataatatttgctatgacagataagagtcaaggaacaaaaggaatttctgcattcatagtagaaaagtcattcccaggattctcaataggaaaattagaaaataagatggggatcagagcatcttcaactactgagttagttatggaaaactgcatagtaccaaaagaaaacctacttagcaaagaaggtaagggatttggtatagcaatgaaaactcttgatggaggaagaattggtatagctgctcaagctttaggtattgcagaaggagcttttgaagaagctgttaactatatgaaagaaagaaaacaatttggtaaaccattatcagcattccaaggattacaatggtatatagctgaaatggatgttaaaatccaagctgctaaatacttagtatacctagctgcaacaaagaagcaagctggtgagccttactcagtagatgctgcaagagctaaattatttgctgcagatgttgcaatggaagttacaactaaagcagttcaaatctttggtggatatggttacactaaagaatacccagtagaaagaatgatgagagatgctaaaatatgcgaaatctacgaaggaacttcagaagttcaaaagatggttatcgcaggaagcattttaagataatctagataaatggaggcgctcgttgatctgagccttgccccctgacgaacggcggtggatggaagatactgctctcaagtgctgaagcggtagcttagctccccgtttcgtgctgatcagtctttttcaacacgtaaaaagcggaggagttttgcaattttgttggttgtaacgatcctccgttgattttggcctctttctccatgggcgggctgggcgtatttgaagcggttctctcttctgccgtta

SEQ ID NO: 4 - DNA, 1482 bp, Artificial Sequence
  Synthetic Construct- Sequence No. 4, Example 4: designer Crotonase DNA construct (1482 bp)
agaaaatctggcaccacacctatatggtagggtgcgagtgaccccgcgcgacttggagctcgatggccccgggttgtttggggcgtccgcctctcgcgctattctgagctggagaccgaggcgcatgaaaatgcattcgcttccataggacgctgcattgtggcttgaaggttcaagggaagggttcaaacgaccccgccgtacgaacttttgtcggggggcgctcccggccccgggctcttgtgcgcgcattagggcttcgggtcgcaagcaagacgatacctcgagcatatggccgccgtcattgccaagtcctccgtctccgcggccgtggctcgcccggcccgctccagcgtgcgccccatggccgcgctgaagcccgccgtcaaggctgcccccgtggctgccccggctcaggccaaccagatggaattaaaaaatgttattcttgaaaaagaagggcatttagctattgttacaatcaatagaccaaaggcattaaatgcattgaattcagaaacactaaaagatttaaatgttgttttagatgatttagaagcagacaacaatgtgtatgcagttatagttactggtgctggtgagaaatcttttgttgctggagcagatatttcagaaatgaaagatcttaatgaagaacaaggtaaagaatttggtattttaggaaataatgtcttcagaagattagaaaaattggataagccagttatcgcagctatatcaggatttgctcttggtggtggatgtgaacttgctatgtcatgtgacataagaatagcttcagttaaagctaaatttggtcaaccagaagcaggacttggaataactccaggatttggtggaactcaaagattagcaagaatagttggaccaggaaaagctaaagaattaatttatacttgtgaccttataaatgcagaagaagcttatagaataggcttagttaataaagtagttgaattagaaaaattgatggaagaagcaaaagcaatggctaacaagattgcagctaatgctccaaaagcagttgcatattgtaaagatgctatagacagaggaatgcaagttgatatagatgcagctatattaatagaagcagaagactttgggaagtgctttgcaacagaagatcaaacagaaggaatgactgcgttcttagaaagaagagcagaaaagaattttcaaaataaaggctgctgccccggctgctgctaatctagataaatggaggcgctcgttgatctgagccttgccccctgacgaacggcggtggatggaagatactgctctcaagtgctgaagcggtagcttagctccccgtttcgtgctgatcagtctttttcaacacgtaaaaagcggaggagttttgcaattttgttggttgtaacgatcctccgttgattttggcctctttctccatgggcgggctgggcgtatttgaagcggttctctcttctgccgtta

SEQ ID NO: 5 - DNA, 1367 bp, Artificial Sequence
  Synthetic Construct- Sequence No. 5, Example 5: designer 3-Hydroxybutyryl-CoA-Dehydrogenase DNA construct (1367 bp)
agaaaatctggcaccacaccatggtagggtgcgagtgaccccgcgcgacttggaagggttcaaacgaccccgccgtacgaacttttgtcggggggcgctcccggctcgagcatatggccgccgtcattgccaagtcctccgtctccgcggccgtggctcgcccggcccgctccagcgtgcgccccatggccgcgctgaagcccgccgtcaaggctgcccccgtggctgccccggctcaggccaaccagatgaaaaagatttttgtacttggagcaggaactatgggtgctggtatcgttcaagcattcgctcaaaaaggttgtgaggtaattgtaagagacataaaggaagaatttgttgacagaggaatagctggaatcactaaaggattagaaaagcaagttgctaaaggaaaaatgtctgaagaagataaagaagctatactttcaagaatttcaggaacaactgatatgaagttagctgctgactgtgatttagtagttgaagctgcaatcgaaaacatgaaaattaagaaggaaatctttgctgagttagatggaatttgtaagccagaagcgattttagcttcaaacacttcatctttatcaattactgaagttgcttcagctacaaagagacctgataaagttatcggaatgcatttctttaatccagctccagtaatgaagcttgttgaaattattaaaggaatagctacttctcaagaaacttttgatgctgttaaggaattatcagttgctattggaaaagaaccagtagaagttgcagaagctccaggattcgttgtaaacggaatcttaatcccaatgattaacgaagcttcattcatccttcaagaaggaatagcttcagttgaagatattgatacagctatgaaatatggtgctaaccatccaatgggacctttagctttaggagatcttattggattagatgtttgcttagctatcatggatgttttattcactgaaacaggtgataacaagtacagagctagcagcatattaagaaaatatgttagagctggatggcttggaagaaaatcaggaaaaggattctatgattattctaaaggctgctgccccggctgctgctaatctagataaatggaggcgctcgttgatctgagccttgccccctgacgaacggcggtggatggaagatactgctctcaagtgctgaagcggtagcttagctccccgtttcgtgctgatcagtctttttcaacacgtaaaaagcggaggagttttgcaattttgttggttgtaacgatcctccgttgattttggcctctttctccatgggcgggctgggcgtatttgaagcggttctctcttctgccgtta

SEQ ID NO: 6 - DNA, 1721 bp, Artificial Sequence
  Synthetic Construct- Sequence No. 6, Example 6: designer Thiolase DNA construct (1721 bp)
agaaaatctggcaccacaccatggtagggtgcgagtgaccccgcgcgacttggaagggttcaaacgaccccgccgtacgaacttttgtcggggggcgctcccggctcgagcatatggccgccgtcattgccaagtcctccgtctccgcggccgtggctcgcccggcccgctccagcgtgcgccccatggccgcgctgaagcccgccgtcaaggctgcccccgtggctgccccggctcaggccaaccagatgggcaaagaaagtagttttagctgtgcatgtcgtacagccatcggaacaatgggtggatctcttagcacaattcctgcagtagatttaggtgctatcgttatcaaagaggctcttaaccgcgcaggtgttaaacctgaagatgttgatcacgtatacatgggatgcgttattcaggcaggacagggacagaacgttgctcgtcaggcttctatcaaggctggtcttcctgtagaagtacctgcagttacaactaacgttgtatgtggttcaggtcttaactgtgttaaccaggcagctcagatgatcatggctggagatgctgatatcgttgttgccggtggtatggaaaacatgtcacttgcaccatttgcacttcctaatggccgttacggatatcgtatgatgtggccaagccagagccagggtggtcttgtagacactatggttaaggatgctctttgggatgctttcaatgattatcatatgatccagacagcagacaacatctgcacagagtggggtcttacacgtgaagagctcgatgagtttgcagctaagagccagaacaaggcttgtgcagcaatcgaagctggcgcattcaaggatgagatcgttcctgtagagatcaagaagaagaaagagacagttatcttcgatacagatgaaggcccaagacagggtgttacacctgaatctctttcaaagcttcgtcctatcaacaaggatggattcgttacagctggtaacgcttcaggtatcaacgacggtgctgcagcactcgtagttatgtctgaagagaaggctaaggagctcggcgttaagcctatggctacattcgtagctggagcacttgctggtgttcgtcctgaagttatgggtatcggtcctgtagcagctactcagaaggctatgaagaaggctggtatcgagaacgtatctgagttcgatatcatcgaggctaacgaagcattcgcagctcagtctgtagcagttggtaaggatcttggaatcgacgtccacaagcagctcaatcctaacggtggtgctatcgctcttggacacccagttggagcttcaggtgctcgtatccttgttacacttcttcacgagatgcagaagaaagacgctaagaagggtcttgctacactttgcatcggtggcggtatgggatgcgctactatcgttgagaagtacgaaggctgctgccccggctgctgctaatctagataaatggaggcgctcgttgatctgagccttgccccctgacgaacggcggtggatggaagatactgctctcaagtgctgaagcggtagcttagctccccgtttcgtgctgatcagtctttttcaacacgtaaaaagcggaggagttttgcaattttgttggttgtaacgatcctccgttgattttggcctctttctccatgggcgggctgggcgtatttgaagcggttctctcttctgccgtta

SEQ ID NO: 7 - DNA, 4211 bp, Artificial Sequence
  Synthetic Construct- Sequence No. 7, Example 7: designer Pyruvate-Ferredoxin-Oxidoreductase DNA construct (4211 bp)
agaaaatctggcaccacaccatggtagggtgcgagtgaccccgcgcgacttggaagggttcaaacgaccccgccgtacgaacttttgtcggggggcgctcccggatggtagggtgcgagtgaccccgcgcgacttggaagggttcaaacgaccccgccgtacgaacttttgtcggggggcgctcccggctcgagcatatggccgccgtcattgccaagtcctccgtctccgcggccgtggctcgcccggcccgctccagcgtgcgccccatggccgcgctgaagcccgccgtcaaggctgcccccgtggctgccccggctcaggccaaccagatggcgcagaggtgcaaggagcccgtcgacggaacgacagccacgacgcacgtggcctacttcatgagcgacagcgcgttcatcttccccatcacgcccagctcggtcatgtccgaggtcgcccacgagtggtccatgaacggccgcaagaacgccttcggccagcccacgatggtccgccagatgcagagcgaggctgggtctgccggcgccctgcacggcgcgctcagcgagggagcgctggcgacgacgttcacgagcagccagggcctgctgctcatgatccccaacatgtacaagatcgccggcgagctcctgccctgcgtcatgcacatcgccgcccgcaccgtcgccaccgaggccctctctatcttcggcgaccacacggatgtctacgcggtgaggtcgacggggttcgcgttcctgtgctccgcgaccgtccaggagtgcatccacatgtccgccgccgcgcacgccgccaccctgtccagcgaggtcccgttcgcccacttcttcgacggcttccgcacgtcccacgagatccagaagatcgacttcccctcggacgccgacctgctggcctgcatgaactttgacgacgtccgcaggttccgtggccgctcgctgtgctgcgagcgcccgctgctgcgcgggacggcgcagaaccccgacgtcttcatgcaggcgtccgagtcgaacctggcgacgctggccagggtccccgcggccatcgacgaggcgctggctcgtgtgaacaaggtgttcgggaccaactacaggacctacgagtactatggccaccccgaggccacggacgtgatcgtggccatgggaagcggcaccgaagtggccatctcgactgccaacttcctcaactcgcgcgacgcgaactcgagggtcggcgtcgtgagggtgcggctgttccggccgtttgtgtcggcggcgtttgtggctgcgctgcccaagaccgtcaagaggatctgcgttctggaccgcgggagggacgggcaggcggccgcggaccccctgcaccaggacgtcctgtcggcgctgggtctggcagcgcccgggagggttcaggtgtgcgtgggaggcgtgtacggtctgtcgtccaaggacttcaaccccgaccacgtgatcgccgtgtacaggaacctcgcgtcggcgagccccaagaacaggttcagcgtcggcatcgtcgacgacgtgacgcacaacagcctggacatgggagagcacgtggacgcgctgccgcaggggacgaagcagtgcctgctgtggggcatcggcggagacgggaccatcggggcgaacaagacggccatcaagctgatcgcggaccacacggagctgcacgcgcaggggtactttgcgtacgacgccaacaaggccggcggcctgacagtctcgcacctgcggttcggcccgacgcggttcgaggcgccgtacctggtgaacgacagcaactacgtggcgtgccacaacttctcgtacgtgcacaggttcaacctgctgtcgtcgctgcgcaccgggggcacgttcgtgctcaactgcccgtgccggaccgtggaggagctggacacggcactcccggtgcgcctgaggcgcgagatcgccaggcggcaggccaagttctatgtgatcgacgcgaccaagatcgccaaggacaacgggatgggcccgttcatcaacatggtcctccaggccgtgttcttctatctgtcccacgtgctcgatgtgaacgaggcagtggcactcctgaagaagagcatccagaagatgtacgcgcgcaagggcgaggaggttgtcaggaagaacgtggcatcggtcgacgcgtcgctggatcccaaggcgttgctgcacatcgagtaccccgcagacaggtggcttgcgctggccgacgagcacgtgccccgcatgggtctgctcactgtccccgagcgcctgcagaagttcaacgccgagctgtacgagccgaccctcgcgtacgatggggagagcatcccggtcagcaggttccctcgcggcggcgagacgccgacgggcacgactcagctgggcaagcgtggcatcgccgagagcgtgccgcactggaaccacgagaagtgcgtgcagtgcaaccagtgctcgttcgtgtgcccgcacgccgtcatccggtcgtaccagatcagcgaggaggagatgaagaacgcccctgccggcttcgacactcttaagtcgcgcaagcccgggtatcgtttccgcatcaacgtcagcgccctggactgcactggctgcagcgtgtgcgtggagcagtgcccagtcaagtgcctggagatgaagcctctcgagtccgagttcgagatgcagaaggacgccatcaggttcgtccgcgagatggtcgcgcccaagcccgagctgggagaccgcaagactcccgtcggcatcgcgtctcacacgccgctgttcgagttcccgggagcctgcgccgggtgcggtgagaccccgctggtgcgcctcgtgacgcagatgttcggtgagcgcatggtcatcgccgcggccactgggtgcaactcgatctggggagcgtcgttcccgaacgtgccgtacacaaccaacgcccgcggggagggccccgcgtggcacaactcgctgttcgaggacgcggcggagctcgggtatggcattacgtgtgcgtatcgccagcgccgcgagcgcctcatcggcatcgtgcggagcgtcgtcgacgatgcgggatccgtgcagggtctgtctgctgagctgaaggctctgctggtcgagtggctcgcgcacgtcagggacttcgagaagacccgcgagctccgcgacaggatgaaccccctgatcgacgcaatcccagcgaacgcggactgcagggttctggagctcagggagaagcacaaccgcgagctgatcgcgcgcacgagtttctggatcctcggtggcgacgggtgggcgtacgacatcggcttcggtggactggaccacgtgatcgccaacaacgaggacgtcaacatccttgttctcgacacggaggtctactccaacactggtggccagcgctccaagtcgacgccgctcggcgcccgcgccaagtacgctgtgctgggcaaggacactgggaagaaggacctggggcgcatcgcgatgacctacgagaccgcgtacgtggccagcatcgcgcagggagccaaccagcagcagtgcatggacgcgctgagggaggccgaggcctaccagggcccctcgatcgtcattgcgtacactccgtgcatggagcaccagatggtccgcgggatgaaggagagccagaagaaccagaagctggctgtggagacgggctactggctgctgtaccgcttcaaccccgacctcatccacgagggcaagaaccccttcaccctcgactcgaagcctccctcgaagcctcccaaggagttcctggacacgcagggccgtttcattactctgcagcgcgagcaccccgagcaggcccacctccttcacgaggcactcacccgctctctggccacccgcttcgtgcgctaccagcgcctcgtgcagctgtacgagcccgctgcccctgccgcagctcctgccacgcatggctgctgccccggctgctgctaatctagataaatggaggcgctcgttgatctgagccttgccccctgacgaacggcggtggatggaagatactgctctcaagtgctgaagcggtagcttagctccccgtttcgtgctgatcagtctttttcaacacgtaaaaagcggaggagttttgcaattttgttggttgtaacgatcctccgttgattttggcctctttctccatgggcgggctgggcgtatttgaagcggttctctcttctgccgtta

SEQ ID NO: 8 - DNA, 2021 bp, Artificial Sequence
  Synthetic Construct- Sequence No. 8, Example 8: designer Pyruvate-Kinase DNA construct (2021 bp)
agaaaatctggcaccacaccatggtagggtgcgagtgaccccgcgcgacttggaagggttcaaacgaccccgccgtacgaacttttgtcggggggcgctcccggctcgagcatatggccgccgtcattgccaagtcctccgtctccgcggccgtggctcgcccggcccgctccagcgtgcgccccatggccgcgctgaagcccgccgtcaaggctgcccccgtggctgccccggctcaggccaaccagatgtctagattagaaagattgacctcattaaacgttgttgctggttctgacttgagaagaacctccatcattggtaccatcggtccaaagaccaacaacccagaaaccttggttgctttgagaaaggctggtttgaacattgtccgtatgaacttctctcacggttcttacgaataccacaagtctgtcattgacaacgccagaaagtccgaagaattgtacccaggtagaccattggccattgctttggacaccaagggtccagaaatcagaactggtaccaccaccaacgatgttgactacccaatcccaccaaaccacgaaatgatcttcaccaccgatgacaagtacgctaaggcttgtgacgacaagatcatgtacgttgactacaagaacatcaccaaggtcatctccgctggtagaatcatctacgttgatgatggtgttttgtctttccaagttttggaagtcgttgacgacaagactttgaaggtcaaggctttgaacgccggtaagatctgttcccacaagggtgtcaacttaccaggtaccgatgtcgatttgccagctttgtctgaaaaggacaaggaagatttgagattcggtgtcaagaacggtgtccacatggtcttcgcttctttcatcagaaccgccaacgatgttttgaccatcagagaagtcttgggtgaacaaggtaaggacgtcaagatcattgtcaagattgaaaaccaacaaggtgttaacaacttcgacgaaatcttgaaggtcactgacggtgttatggttgccagaggtgacttgggtattgaaatcccagccccagaagtcttggctgtccaaaagaaattgattgctaagtctaacttggctggtaagccagttatctgtgctacccaaatgttggaatccatgacttacaacccaagaccaaccagagctgaagtttccgatgtcggtaacgctatcttggatggtgctgactgtgttatgttgtctggtgaaaccgccaagggtaactacccaatcaacgccgttaccactatggctgaaaccgctgtcattgctgaacaagctatcgcttacttgccaaactacgatgacatgagaaactgtactccaaagccaacctccaccaccgaaaccgtcgctgcctccgctgtcgctgctgttttcgaacaaaaggccaaggctatcattgtcttgtccacttccggtaccaccccaagattggtttccaagtacagaccaaactgtccaatcatcttggttaccagatgcccaagagctgctagattctctcacttgtacagaggtgtcttcccattcgttttcgaaaaggaacctgtctctgactggactgatgatgttgaagcccgtatcaacttcggtattgaaaaggctaaggaattcggtatcttgaagaagggtgacacttacgtttccatccaaggtttcaaggccggtgctggtcactccaacactttgcaagtctctaccgttggctgctgccccggctgctgctaatctagataaatggaggcgctcgttgatctgagccttgccccctgacgaacggcggtggatggaagatactgctctcaagtgctgaagcggtagcttagctccccgtttcgtgctgatcagtctttttcaacacgtaaaaagcggaggagttttgcaattttgttggttgtaacgatcctccgttgattttggcctctttctccatgggcgggctgggcgtatttgaagcggttctctcttctgccgtta

SEQ ID NO: 9 - DNA, 1815 bp, Artificial Sequence
  Synthetic Construct- Sequence No. 9, Example 9: designer Enolase DNA construct (1815 bp)
agaaaatctggcaccacacctatatggtagggtgcgagtgaccccgcgcgacttggagctcgatggccccgggttgtttggggcgtccgcctctcgcgctattctgagctggagaccgaggcgcatgaaaatgcattcgcttccataggacgctgcattgtggcttgaaggttcaagggaagggttcaaacgaccccgccgtacgaacttttgtcggggggcgctcccggccccgggctcttgtgcgcgcattagggcttcgggtcgcaagcaagacgatacctcgagcatatggccgccgtcattgccaagtcctccgtctccgcggccgtggctcgcccggcccgctccagcgtgcgccccatggccgcgctgaagcccgccgtcaaggctgcccccgtggctgccccggctcaggccaaccaggtgaccaaggctgttgagaacatcaacgctattattgcccccgccctgaagggcatggaccccgtcaagcaggcggagattgaccagaagatgaaggacctggacggcactgacaacaagggcaagctgggtgccaacgccatcctggccgtctccatggccgtgtgcaaggccggtgccgctgagaagggcgtgcccctgtacaagcacattgcggacctggccggcaacagcaagctgatcctgcccgtgccctcgttcaacatcatcaacggcggcagccacgccggcaacgccctggctatgcaggagttcatgatcctgcccgttggcgcctcgagcttctctgaggccatgcgcatgggctgcgaggtgtaccacgccctgaagggcctgatcaaggccaagtacggccaggacgcctgcaacgtgggtgatgagggtggcttcgcccccaacatcggctccaacgatgagggcctgaacttggtgaacgaggccatcgagaaggccggctacaccggcaaggtgaagatcggcatggacgtggcctcgtcggagttctacaccgaggacggcatgtacgacctggacttcaagaaccagcccaacgatggctcgcagaagaagaccaaggagcagatgctggagctgtacaacgagttctgcaagaagtacccggtcatctccatcgaggaccccttcgagcaggacgactgggagccctgcgccaagctgaccaccgagaacatctgccaggtggtcggcgacgacatcctggtgaccaaccccgtgcgcgtgaagaaggccatcgacgccaaggccgtcaacgctctgctgctcaaggtcaaccagatcggtaccattaccgagtccattgaggccgtgcgcatggccaaggaggccggctggggtgtcatgaccagccaccgctcgggtgagactgaggactctttcatcgccgacctggcggtgggcctggcctccggccagatcaagaccggcgccccctgccgctcggagcgcaatgccaagtacaaccagctgctgcgcatcgaggaggagctgggcgagaacgctgtgtacgctggcgagagctggcgccacatcggctggggctgctgccccggctgctgctaatctagataaatggaggcgctcgttgatctgagccttgccccctgacgaacggcggtggatggaagatactgctctcaagtgctgaagcggtagcttagctccccgtttcgtgctgatcagtctttttcaacacgtaaaaagcggaggagttttgcaattttgttggttgtaacgatcctccgttgattttggcctctttctccatgggcgggctgggcgtatttgaagcggttctctcttctgccgtta

SEQ ID NO: 10 - DNA, 2349 bp, Artificial Sequence
  Synthetic Construct- Sequence No. 10, Example 10: designer Phosphoglycerate-Mutase DNA construct (2349 bp)
agaaaatctggcaccacacctatatggtagggtgcgagtgaccccgcgcgacttggagctcgatggccccgggttgtttggggcgtccgcctctcgcgctattctgagctggagaccgaggcgcatgaaaatgcattcgcttccataggacgctgcattgtggcttgaaggttcaagggaagggttcaaacgaccccgccgtacgaacttttgtcggggggcgctcccggccccgggctcttgtgcgcgcattagggcttcgggtcgcaagcaagacgatacctcgagcatatggccgccgtcattgccaagtcctccgtctccgcggccgtggctcgcccggcccgctccagcgtgcgccccatggccgcgctgaagcccgccgtcaaggctgcccccgtggctgccccggctcaggccaaccagatggcgcacgactacaagctgaaggcccacccggcgattcctgcgcccgagggcccgctgctggtctgcattctggacggcttcggcgagaacgagtacaaggatgagttcaacgccgtgcacgtggctaagacgcccactgtggacgcgctgcgcgctgtgccccatcgcttccgttccatcaaggcgcacggaaaggctgtgggcctgcccagcgatgccgacatgggcaacagcgaggtggggcacaacgccctgggctcgggccaggtggtggaccaaggcgcgcgcctggtggacctggcgctggagaccggccgtatgttctcggaccccggctggaagctcatcagcgaggccttcccctcccacaccgtccacttcatcggcctgctgtccgacggcggcgtgcactcgcgcgccgatcagctgcacggctgcctgcgcggcgccgtggagcgcggcgccaagcgcgtgcgcgtgcacatcctgactgacggccgcgacgtgccggacggcagcagcatccggttcgtggaggagctggaggcggtgctggcggagctgcgcggcaagggctgcgacatcgccatcgcctcgggcggcggccgcatgcaggtcaccatggaccgctacgaggcggactggagcatggtgaagcgcggctgggacgcgcacgtgctgggcaaggcgccccactacttcaaggacgccaagaccgcggtcaccaccctgcgcggctccgaggacgcgccggtgtctgaccagtacgtggccccctttgtgattgtggacgaggcggacaagccggtgggcaccattgaggacggcgacgcggtggtgctgttcaacttccgcgcggaccgcatggtggagatcagcaaggccttcgagtacgaggacggcttcaccgcctttgagcgcgagcgcttccccaagggcctgcgcttcgtgggcatgatgcagtacgacggcgacctgaagctgcccgccaacttcctggtgccgccgcccctgattgagcacgtgtcgggcgagtacctgtgcaagaacgggctgagcaccttcgcctgctccgagactcagaagttcgggcacgtgacgttcttctggaacggcaaccgctccggctacctggacgccaagcaggagcagtacctggagatcccgtcggacaagatcgagttcaacaaggctccggacatgaaggcgcgcgagatcaccgccgccggcattgaggcgctcaagagcggcaagtacaaggtggtgcgcatcaactacgccaacccggacatggtcggccacaccggcgacatggctgccaccgtccgcgcctgcgagaccgtggacgggtgcgtgaaggagctgctggaggtggtggacagcctgaacggccgctggatcgtcacgtccgaccacggcaacgccgacgacatggtgcagcgcgacaagaagggcaagcccctgctgggcgaggacggcaagccgctgcccctgaccagccacacgctggcgcccgtgccgttcttcatcggcggcaagggcctgccggacggcgtggtgctgcgcgacgacctgccggacgccgggctggccaacgtggccgccaccaccttcaacctgctgggcttcgaggcgcccggcatctacaagcccagcatggtcaaggcgtaatctagataaatggaggcgctcgttgatctgagccttgccccctgacgaacggcggtggatggaagatactgctctcaagtgctgaagcggtagcttagctccccgtttcgtgctgatcagtctttttcaacacgtaaaaagcggaggagttttgcaattttgttggttgtaacgatcctccgttgattttggcctctttctccatgggcgggctgggcgtatttgaagcggttctctcttctgccgtta

SEQ ID NO: 11 - DNA, 1908 bp, Artificial Sequence
  Synthetic Construct- Sequence No. 11, Example 11: designer Phosphoglycerate-Kinase DNA construct (1908 bp)
agaaaatctggcaccacacctatatggtagggtgcgagtgaccccgcgcgacttggagctcgatggccccgggttgtttggggcgtccgcctctcgcgctattctgagctggagaccgaggcgcatgaaaatgcattcgcttccataggacgctgcattgtggcttgaaggttcaagggaagggttcaaacgaccccgccgtacgaacttttgtcggggggcgctcccggccccgggctcttgtgcgcgcattagggcttcgggtcgcaagcaagacgatacatggccctctctatgaagatgcgcgccaacgcgcgcgtgtccggtcgccgcgtcgccgctgtggccccccgcgtggtgcccttctcgtcggcctccagctccgtgctgcgctctggcttcgcgctgaggtgtctgtggacatccgccgcgtgggccgctctcgcatccgtcgtcgaggcggtgaagaagtcggttggcgacctgcacaaggctgacctggagggcaagcgcgtgttcgtccgcgcggacctgaacgtgcctcttgacaaggccaccctggccatcaccgacgacacccgcattcgcgcggccgtccccaccctgaagtacctgctggacaacggtgctaaggtcctgctgacctcgcacctgggtcgcccgaagggcggtcccgaggacaagtaccgcctgacccccgtggtggcccgcctgtcggagctgctgggcaagcccgtgaccaaggtcgatgactgcatcggccccgaggtggagaaggcggtgggcgccatgaagaacggcgagctgctgctgctggagaactgccgcttctacaaggaggaggagaagaacgagcccgagttcgccaagaagctggccgccaacgccgacctgtacgtgaacgacgcgttcggcactgcccaccgcgcccacgcctccaccgagggtgtgaccaagttcctgaagccctccgtggccggcttcctgctgcagaaggagctggactaccttgatggcgccgtgtccaaccccaagcgccccttcgtggccattgtgggcggctccaaggtgtcctccaagatcaccgtcattgaggcgctgatggagaagtgcgacaagatcatcatcggcggtggcatgatcttcaccttctacaaggcccgcgcgctgaaggtgggctcctcgctggttgaggacgacaagatcgagctggccaagaagctggaggagatggccaaggccaagggtgtgcagctgctgctgcccaccgacgtggtggtggccgacaagttcgacgccaacgccaacacccagaccgtgcccatcaccgccatccccgatggctggatgggtctggacattggcccggactccgtcaagaccttcaacgacgccctggccgacgccaagaccgttgtgtggaacggccccatgggtgtgttcgagtttccccaagttcgccaacgcaccgtgtcgatcgccaacaccctggccggcctgacgcccaagggctgcatcaccatcattggtggcggtgactccgtggctgccgtcgagcaggccggcgttgccgagaagatgagccacatctccaccggcggcggtgcctccctggagctgctggagggcaaggtcctgcccggcgtggccgccctggacgagaagtaaatggaggcgctcgttgatctgagccttgccccctgacgaacggcggtggatggaagatactgctctcaagtgctgaagcggtagcttagctccccgtttcgtgctgatcagtctttttcaacacgtaaaaagcggaggagttttgcaattttgttggttgtaacgatcctccgttgattttggcctctttctccatgggcgggctgggcgtatttgaagcggttctctcttctgccgtta

SEQ ID NO: 12 - DNA, 1677 bp, Artificial Sequence
  Synthetic Construct- Sequence No. 12, Example 12: designer NAD-dependent Glyceraldehyde-3-Phosphate-Dehydrogenase DNA construct (1677 bp)
agaaaatctggcaccacacctatatggtagggtgcgagtgaccccgcgcgacttggagctcgatggccccgggttgtttggggcgtccgcctctcgcgctattctgagctggagaccgaggcgcatgaaaatgcattcgcttccataggacgctgcattgtggcttgaaggttcaagggaagggttcaaacgaccccgccgtacgaacttttgtcggggggcgctcccggccccgggctcttgtgcgcgcattagggcttcgggtcgcaagcaagacgatacatggccgccgtcattgccaagtcctccgtctccgcggccgtggctcgcccggcccgctccagcgtgcgccccatggccgcgctgaagcccgccgtcaaggctgcccccgtggctgccccggctcaggccaaccagatggctcccatcaagatcggcatcaatggttttggtcgtattggccgcctcgtgtggcgtgccactcttaaccgtgacgatgtcgaggtcgtcgccatcaatgatccattcattgatgtgccatacatggtctacatggccaagtatgactcggtccacggcaacctgacccacgacgttcagcaaggcgacggcaagctgatggtcaatggcaagtcaatcaccatcttcggcaagatggatgccaaggagatcccatggaaggaggccggcgcgaccttcgtcgttgagtcgactggtgtgttcaccaccctggagggcgccagctctcacctggtcggcggtgctgagaccgtcgtcatctccgccccatcaaacgatgcccccatgttcgtcatgggtgtcaacgaggagggctacaagccagacatgaaagtggtgtccaacgcgtcttgcaccaccaactgcctgggccccctggccaaggtcatccaccttaagttcggcatcctggagggcctgatgaccaccgtccacgcgaccaccgccacccagaagaccgtcgacgggccgtccaagaaggactggcgcggcgggcgcggcatcctggacaacatcatcccctcggcgactggtgccgccaaggccgtcggcaaggtgctgcctgccctgaacggcaagctcaccggcatggccttccgcgtgcccacccccgatgtctcggtcgtcgatctgaccgtgcgcctggagaagggtgcgtcgtacgacgccatcaaggccgagatcaagcgcgcgagcgagaacgagctcaagggcatcctggcctacaccgaggatgccgtggtctccaccgacttcatcggcaacaagcacagctccatcttcgacgccgaggccggcatcgccctcaacgacaactttgtcaagctggtctcctggtacgacaacgagtggggctactccaaccgtgtcgtcgacctgatcgcgcacatggccaaggtcaaggccgccagccactaaatggaggcgctcgttgatctgagccttgccccctgacgaacggcggtggatggaagatactgctctcaagtgctgaagcggtagcttagctccccgtttcgtgctgatcagtctttttcaacacgtaaaaagcggaggagttttgcaattttgttggttgtaacgatcctccgttgattttggcctctttctccatgggcgggctgggcgtatttgaagcggttctctcttctgccgtta

SEQ ID NO: 13 - DNA, 2351 bp, Artificial Sequence
  Synthetic Construct- Sequence No. 13, Example 13: designer HydA1-promoter-linked Phosphoglycerate-Mutase DNA construct (2351 bp)
agaaaatctggcaccacaccgagctgtcatgcgttgttccgttatgtgtcgtcaaacgccttcgagcgctgcccggaacaatgcgtactagtataggagccatgaggcaagtgaacagaagcgggctgactggtcaaggcgcacgatagggctgacgagcgtgctgacggggtgtaccgccgagtgtccgctgcattcccgccggattgggaaatcgcgatggtcgcgcataggcaagctcgcaaatgctgtcagcttatcttacatgaacacacaaacactctcgcaggcactagcctcaaatggccgccgtcattgccaagtcctccgtctccgcggccgtggctcgcccggcccgctccagcgtgcgccccatggccgcgctgaagcccgccgtcaaggctgcccccgtggctgccccggctcaggccaaccagatggcgcacgactacaagctgaaggcccacccggcgattcctgcgcccgagggcccgctgctggtctgcattctggacggcttcggcgagaacgagtacaaggatgagttcaacgccgtgcacgtggctaagacgcccactgtggacgcgctgcgcgctgtgccccatcgcttccgttccatcaaggcgcacggaaaggctgtgggcctgcccagcgatgccgacatgggcaacagcgaggtggggcacaacgccctgggctcgggccaggtggtggaccaaggcgcgcgcctggtggacctggcgctggagaccggccgtatgttctcggaccccggctggaagctcatcagcgaggccttcccctcccacaccgtccacttcatcggcctgctgtccgacggcggcgtgcactcgcgcgccgatcagctgcacggctgcctgcgcggcgccgtggagcgcggcgccaagcgcgtgcgcgtgcacatcctgactgacggccgcgacgtgccggacggcagcagcatccggttcgtggaggagctggaggcggtgctggcggagctgcgcggcaagggctgcgacatcgccatcgcctcgggcggcggccgcatgcaggtcaccatggaccgctacgaggcggactggagcatggtgaagcgcggctgggacgcgcacgtgctgggcaaggcgccccactacttcaaggacgccaagaccgcggtcaccaccctgcgcggctccgaggacgcgccggtgtctgaccagtacgtggccccctttgtgattgtggacgaggcggacaagccggtgggcaccattgaggacggcgacgcggtggtgctgttcaacttccgcgcggaccgcatggtggagatcagcaaggccttcgagtacgaggacggcttcaccgcctttgagcgcgagcgcttccccaagggcctgcgcttcgtgggcatgatgcagtacgacggcgacctgaagctgcccgccaacttcctggtgccgccgcccctgattgagcacgtgtcgggcgagtacctgtgcaagaacgggctgagcaccttcgcctgctccgagactcagaagttcgggcacgtgacgttcttctggaacggcaaccgctccggctacctggacgccaagcaggagcagtacctggagatcccgtcggacaagatcgagttcaacaaggctccggacatgaaggcgcgcgagatcaccgccgccggcattgaggcgctcaagagcggcaagtacaaggtggtgcgcatcaactacgccaacccggacatggtcggccacaccggcgacatggctgccaccgtccgcgcctgcgagaccgtggacgggtgcgtgaaggagctgctggaggtggtggacagcctgaacggccgctggatcgtcacgtccgaccacggcaacgccgacgacatggtgcagcgcgacaagaagggcaagcccctgctgggcgaggacggcaagccgctgcccctgaccagccacacgctggcgcccgtgccgttcttcatcggcggcaagggcctgccggacggcgtggtgctgcgcgacgacctgccggacgccgggctggccaacgtggccgccaccaccttcaacctgctgggcttcgaggcgcccggcatctacaagcccagcatggtcaaggcgtaaatggaggcgctcgttgatctgagccttgccccctgacgaacggcggtggatggaagatactgctctcaagtgctgaagcggtagcttagctccccgtttcgtgctgatcagtctttttcaacacgtaaaaagcggaggagttttgcaattttgttggttgtaacgatcctccgttgattttggcctctttctccatgggcgggctgggcgtatttgaagcggttctctcttctgccgtta

SEQ ID NO: 14 - DNA, 1796 bp, Artificial Sequence
  Synthetic Construct- Sequence No. 14, Example 14: designer HydA1-promoter-linked Enolase DNA construct (1796 bp)
agaaaatctggcaccacaccgagctgtcatgcgttgttccgttatgtgtcgtcaaacgccttcgagcgctgcccggaacaatgcgtactagtataggagccatgaggcaagtgaacagaagcgggctgactggtcaaggcgcacgatagggctgacgagcgtgctgacggggtgtaccgccgagtgtccgctgcattcccgccggattgggaaatcgcgatggtcgcgcataggcaagctcgcaaatgctgtcagcttatcttacatgaacacacaaacactctcgcaggcactagcctcaaatggccgccgtcattgccaagtcctccgtctccgcggccgtggctcgcccggcccgctccagcgtgcgccccatggccgcgctgaagcccgccgtcaaggctgcccccgtggctgccccggctcaggccaaccaggtgaccaaggctgttgagaacatcaacgctattattgcccccgccctgaagggcatggaccccgtcaagcaggcggagattgaccagaagatgaaggacctggacggcactgacaacaagggcaagctgggtgccaacgccatcctggccgtctccatggccgtgtgcaaggccggtgccgctgagaagggcgtgcccctgtacaagcacattgcggacctggccggcaacagcaagctgatcctgcccgtgccctcgttcaacatcatcaacggcggcagccacgccggcaacgccctggctatgcaggagttcatgatcctgcccgttggcgcctcgagcttctctgaggccatgcgcatgggctgcgaggtgtaccacgccctgaagggcctgatcaaggccaagtacggccaggacgcctgcaacgtgggtgatgagggtggcttcgcccccaacatcggctccaacgatgagggcctgaacttggtgaacgaggccatcgagaaggccggctacaccggcaaggtgaagatcggcatggacgtggcctcgtcggagttctacaccgaggacggcatgtacgacctggacttcaagaaccagcccaacgatggctcgcagaagaagaccaaggagcagatgctggagctgtacaacgagttctgcaagaagtacccggtcatctccatcgaggaccccttcgagcaggacgactgggagccctgcgccaagctgaccaccgagaacatctgccaggtggtcggcgacgacatcctggtgaccaaccccgtgcgcgtgaagaaggccatcgacgccaaggccgtcaacgctctgctgctcaaggtcaaccagatcggtaccattaccgagtccattgaggccgtgcgcatggccaaggaggccggctggggtgtcatgaccagccaccgctcgggtgagactgaggactctttcatcgccgacctggcggtgggcctggcctccggccagatcaagaccggcgccccctgccgctcggagcgcaatgccaagtacaaccagctgctgcgcatcgaggaggagctgggcgagaacgctgtgtacgctggcgagagctggcgccacatcggctggtaaatggaggcgctcgttgatctgagccttgccccctgacgaacggcggtggatggaagatactgctctcaagtgctgaagcggtagcttagctccccgtttcgtgctgatcagtctttttcaacacgtaaaaagcggaggagttttgcaattttgttggttgtaacgatcctccgttgattttggcctctttctccatgggcgggctgggcgtatttgaagcggttctctcttctgccgtta

SEQ ID NO: 15 - DNA, 1832 bp, Artificial Sequence
  Synthetic Construct- Sequence No. 15, Example 15: designer HydA1-promoter-linked Pyruvate-Kinase DNA construct (1832 bp)
agaaaatctggcaccacaccgagctgtcatgcgttgttccgttatgtgtcgtcaaacgccttcgagcgctgcccggaacaatgcgtactagtataggagccatgaggcaagtgaacagaagcgggctgactggtcaaggcgcacgatagggctgacgagcgtgctgacggggtgtaccgccgagtgtccgctgcattcccgccggattgggaaatcgcgatggtcgcgcataggcaagctcgcaaatgctgtcagcttatcttacatgaacacacaaacactctcgcaggcactagcctcaaatggccgccgtcattgccaagtcctccgtctccgcggccgtggctcgcccggcccgctccagcgtgcgccccatggccgcgctgaagcccgccgtcaaggctgcccccgtggctgccccggctcaggccaaccagatgtgcgagatgctggacgcgggcgtggtgggctgccgcgtggacctgacgtggggcccgctggagttccaccgcaagtcgcttgccaatctgcagcaggccatgcgcaagagccgccgcctgtgttgcaccatggtggacacgctgggccgcgagctcatgatccgccgccagagaggggcaggctggacccagcgccagaggggtggggtgatcatcaccacgcgcacggacgtggacgccagcagcaacgtgctgcccatcacttacagcaagttcacggagatggcggtcaagggcgacaccatctacatcggccgctacctggtgtgcggcgcagacagcgcctcgctgtacctggaggtcatggacgtgcagggcgacgacgtgtactgcatcgccaagaacgacgcggtgctggacggcctgctgacggtgttccacgcggagcgctccgtggaggggctggccaacgtgcagaacgacctgccgctgctgtccgactacgacaaggagtgcctgcacatcctggcgcaggacttcgagcgcgcgccctacatctccaagctggagtccatcgcctcctccgccgtgcgcgccgccgaccgcgtgggcgccagcctgattgtggtgtacacgcacaccggcaagacggcgcagctggtggccaagtaccggccgcccatgcccatcctgacgctggtggtgccgcacctggtgtctgaccagctcaagtggaagctggagggcaggtccagcgcgcgccagtgcctcatcagtcgcgcgctgctgccggtgctggccgcgccctcgcccagcggcgaccagctgctgcaggaggcggtggccatggcgggccgcgtcaagctggtcaagccgcacgaccacgtggtgtgcgtgcagcgcatccacgacgacttctgcgtcaagatcatctccgtggacgacatgggcgcgggcatcaagcgcgacgacacggtcatgtcgcacagcgtgtttggcagcagccccatggccgtgcagggctcgtccggctacgactcgccgcgcgtgcacaacaaccccatcggcaacaagttcggccccatgccgcccgccatcatcaccaccggcaatagcttcaccctgggcggcatgggcgtgggcgtgctgtaaatggaggcgctcgttgatctgagccttgccccctgacgaacggcggtggatggaagatactgctctcaagtgctgaagcggtagcttagctccccgtttcgtgctgatcagtctttttcaacacgtaaaaagcggaggagttttgcaattttgttggttgtaacgatcctccgttgattttggcctctttctccatgggcgggctgggcgtatttgaagcggttctctcttctgccgtta

SEQ ID NO: 16 - DNA, 4376 bp, Artificial Sequence
  Synthetic Construct- Sequence No. 16, Example 16: designer HydA1-promoter-linked Pyruvate-Ferredoxin-Oxidoreductase DNA construct (4376 bp)
agaaaatctggcaccacaccgagctgtcatgcgttgttccgttatgtgtcgtcaaacgccttcgagcgctgcccggaacaatgcgtactagtataggagccatgaggcaagtgaacagaagcgggctgactggtcaaggcgcacgatagggctgacgagcgtgctgacggggtgtaccgccgagtgtccgctgcattcccgccggattgggaaatcgcgatggtcgcgcataggcaagctcgcaaatgctgtcagcttatcttacatgaacacacaaacactctcgcaggcactagcctcaaatggccgccgtcattgccaagtcctccgtctccgcggccgtggctcgcccggcccgctccagcgtgcgccccatggccgcgctgaagcccgccgtcaaggctgcccccgtggctgccccggctcaggccaaccagatgggaaagaaaatgatgacgactgatggcaatacagcgacagcgcacgtggcgtatgccatgagcgaagtcgccgccatctaccccatcaccccttcctcgaccatgggcgaggaggctgacgactgggcggcgcaaggacgcaagaacatctttggccagaccctgaccatacgcgaaatgcagtccgaggccggcgccgccggcgcggtgcacggggccctggcggccggcgccctgaccacgaccttcacggcgtcgcagggtctgctgctgatgatccccaacatgtacaagatctccggcgaacttctgcccggcgtgttccacgtcaccgcccgcgccatcgccgcgcacgccctgtccatcttcggtgaccaccaggatatctacgccgcgcgccagacaggcttcgccatgctcgcctccagctcggtgcaggaggcccacgacatggccctggtggcccacttggcggccatcgagtccaacgtgccgttcatgcacttcttcgacggattccgcacctcgcacgaaatccagaagatcgaggtcctggactacgcggacatggcctcgctggtgaaccagaaggccctggcggaattccgcgccaagtccatgaaccccgagcacccccacgtgcgcggcacggcccagaaccccgacatctacttccagggtcgcgaggcagccaacccctactacctcaaggtgcccggcatcgttgccgagtacatgcagaaggtcgcctccctcacgggccgcagctacaagctctttgactacgtgggtgctcccgacgccgagcgcgtcatcgtgtccatgggctcctcgtgcgagaccatcgaggaggtcatcaaccacctcgcggccaagggcgaaaagatcggcctgatcaaggtccgcctgtacaggcccttcgtaagcgaggccttcttcgctgctctgcccgcttcggccaaggtcatcacggtcctcgaccgcaccaaggaacccggcgcgcccggcgatccgctctacctcgacgtgtgctcggccttcgtggagcgcggcgaagccatgcccaagatcctggccggccgctacggcctgggttccaaggaattcagcccggccatggtcaagtccgtgtacgacaacatgtccggcgctaagaagaaccacttcaccgtgggcatcgaagacgacgtgaccggcacttcgctgccggtggacaacgccttcgccgacaccacgcccaagggcaccatccagtgccagttctggggcctcggcgccgacggcactgtgggcgccaacaagcaggccatcaagatcatcggcgacaacacggacctgtttgcccagggttacttctcctacgactccaagaaatcgggcggcatcaccatctcgcacctgcgcttcggcgagaagcccatccagtccacctacctggtcaacagggccgactatgtcgcctgtcacaacccggcctacgtgggcatatacgacatcctcgaaggcatcaaggatggcggaaccttcgtgctcaactcgccttggagcagcctcgaggacatggacaagcacctgccctccggcatcaagcgcaccatcgcgaacaagaagctcaagttctacaacatcgacgcggtgaaaatcgccaccgatgtgggactgggcggccgcatcaacatgatcatgcagacggccttcttcaagctggccggagtgctgcccttcgaaaaggccgtggatctgctcaagaagtccatccacaaggcctacggcaaaaagggcgagaagatcgtcaagatgaacaccgacgccgtggaccaggccgtcacctccctgcaggaattcaagtatccggattcctggaaggacgctcccgctgagaccaaggccgagcccatgacgaacgagttcttcaagaacgtcgtcaagcccatcctgacccagcagggcgacaagctgccggtgagcgccttcgaggccgacggccgtttccccctcggcaccagccagttcgagaagcgcggcgtggccatcaacgtgccgcagtgggtccccgagaactgcatccagtgcaaccagtgcgccttcgtctgtccgcacagcgccatcctgcccgtgctggccaaggaagaggagttggtcggcgcgccggcgaacttcacggccctggaagccaagggcaaggagctcaagggctacaagttccgcatccagatcaacaccctggactgcatgggctgcggcaactgcgccgacatctgtccgcccaaggaaaaggctctggtcatgcagcccctggatacccagcgcgacgcgcaggtgcccaacctggagtacgcagcgcgcatcccggtcaaatccgaggtgctgccgcgcgactcgctcaagggcagccagttccaggagcctctcatggaattctcgggcgcctgctcgggctgcggcgagacgccctacgtgcgcgtcatcacccagctcttcggcgagcgcatgttcattgccaacgccacgggttgctcgtccatctggggcgcgtcggctccttccatgccttacaagaccaaccgcctcggacaaggcccggcctggggtaactccctgttcgaagacgcggccgaatacggcttcggcatgaacatgtccatgttcgcccgccgcacgcatttggccgatcttgccgccaaggccctggagagcgatgcctccggcgatgtcaaggaagccctgcagggctggcttgccggcaagaacgatcccatcaagtccaaggaatacggcgacaagctcaagaagctgctggctggtcagaaggatggtctgctcggacagatcgccgccatgtccgacctgtacaccaagaagagcgtgtggatcttcggtggcgacggctgggcctacgacatcggttacggcggcctggaccatgtgctcgcctcgggcgaggacgtgaacgtcttcgtcatggataccgaggtctactccaacaccggcggccagtcctccaaggcaacgcccacgggcgccgtggccaagttcgcggcggccggcaagcgtaccggcaagaaggacctggcgcgcatggtcatgacctacggctacgtctacgtggctacggtctccatgggttacagcaagcagcagttcctcaaggtgctcaaggaagccgaaagcttccccggcccctcgctggtcatcgcctatgctacctgcatcaaccagggtctgcgcaagggcatgggcaagagccaggacgtcatgaacaccgcggtcaagtccggttactggccgctgttccgctacgatccgcgcttggccgcccagggcaagaaccccttccagctcgactccaaggctcctgacggttccgtcgaggagttcctgatggcccagaaccgcttcgccgtcctcgatcggtccttccccgaggacgccaagagactgcgcgcccaggtcgctcacgaattggacgtgcgtttcaaggagttggagcacatggccgccacgaacatcttcgagtccttcgcgccagcgggcggcaaggccgatggttcggtggatttcggcgaaggtgcggagttctgcacgcgcgacgatactcccatgatggcccgacctgattccggtgaggcctgcgaccagaaccgcgctggcacgagcgaacagcagggagacctcagcaagcggacgaagaagtaaatggaggcgctcgttgatctgagccttgccccctgacgaacggcggtggatggaagatactgctctcaagtgctgaagcggtagcttagctccccgtttcgtgctgatcagtctttttcaacacgtaaaaagcggaggagttttgcaattttgttggttgtaacgatcctccgttgattttggcctctttctccatgggcgggctgggcgtatttgaagcggttctctcttctgccgtta

SEQ ID NO: 17 - DNA, 6092 bp, Artificial Sequence
  Synthetic Construct- Sequence No. 17, Example 17: designer HydA1-promoter-linked Pyruvate-NADP+-Oxidoreductase DNA construct (6092 bp)
agaaaatctggcaccacaccgagctgtcatgcgttgttccgttatgtgtcgtcaaacgccttcgagcgctgcccggaacaatgcgtactagtataggagccatgaggcaagtgaacagaagcgggctgactggtcaaggcgcacgatagggctgacgagcgtgctgacggggtgtaccgccgagtgtccgctgcattcccgccggattgggaaatcgcgatggtcgcgcataggcaagctcgcaaatgctgtcagcttatcttacatgaacacacaaacactctcgcaggcactagcctcaaatggccgccgtcattgccaagtcctccgtctccgcggccgtggctcgcccggcccgctccagcgtgcgccccatggccgcgctgaagcccgccgtcaaggctgcccccgtggctgccccggctcaggccaaccagatgaagcagtctgtccgcccaattatttccaatgtactgcgcaaggaggttgctctgtactcaacaatcattggacaagacaaggggaaggaaccaactggtcgaacatacaccagtggcccaaaaccggcatctcacattgaagttccccatcatgtgactgtgcctgccactgaccgcaccccgaatcccgatgctcaattctttcagtctgtagatgggtcacaagccaccagtcacgttgcgtacgctctgtctgacacagcgttcatttacccaattacacccagttctgtgatgggcgagctggctgatgtttggatggctcaagggaggaagaacgcctttggtcaggttgtggatgtccgtgagatgcaatctgaggctggagccgcaggcgccctgcatggggcactggctgctggagctattgctacaaccttcactgcctctcaagggttgttgttgatgattcccaacatgtataagattgcaggtgagctgatgccctctgtcatccacgttgcagcccgagagcttgcaggccacgctctgtccatttttggaggacacgctgatgtcatggctgtccgccaaacaggatgggctatgctgtgctcccacacagtgcagcagtctcacgacatggctctcatctcccacgtggccaccctcaagtccagcatccccttcgttcacttctttgatggtttccgcacaagccacgaagtgaacaaaatcaaaatgctgccttatgcagaactgaagaaactggtgcctcctggcaccatggaacagcactgggctcgttcgctgaaccccatgcaccccaccatccgaggaacaaaccagtctgcagacatctacttccagaatatggaaagtgcaaaccagtactacactgatctggccgaggtcgttcaggagacaatggacgaagttgcaccatacatcggtcgccactacaagatctttgagtatgttggtgcaccagatgcagaagaagtgacagtgctcatgggttctggtgcaaccacagtcaacgaggcagtggaccttcttgtgaagcgtggaaagaaggttggtgcagtcttggtgcacctctaccgaccatggtcaacaaaggcatttgaaaaggtcctgcccaagacagtgaagcgcattgctgctctggatcgctgcaaggaggtgactgcactgggtgagcctctgtatctggatgtgtcggcaactctgaatttgttcccggaacgccagaatgtgaaagtcattggaggacgttacggattgggctcaaaggatttcatcccggagcatgccctggcaatttacgccaacttggccagcgagaaccccattcaaagattcactgtgggtatcacagatgatgtcactggcacatccgttcctttcgtcaacgagcgtgttgacacgttgcccgagggcacccgccagtgtgtcttctggggaattggttcagatggaacagtgggagccaatcgctctgccgtgagaatcattggagacaacagcgatttgatggttcaggcctacttccaatttgatgctttcaagtcaggtggtgtcacttcctcgcatctccgttttggaccaaagcccatcacagcgcaataccttgttaccaatgctgactacatcgcgtgccacttccaggagtatgtcaagcgctttgacatgcttgatgccatccgtgaggggggcacctttgttctcaattctcggtggaccacggaggacatggagaaggagattccggctgacttccggcgcaagctggcacagaagaaggtccgcttctacaatgtggatgctcgaaagatctgtgacagttttggtcttgggaagcgcatcaatatgctgatgcaggcttgtttcttcaagctgtctggggtgctcccactggccgaagctcagcggctgctgaacgagtccattgtgcatgagtatggaaagaagggtggcaaggtggtggagatgaaccaagcagtggtgaatgctgtctttgctggtgacctgccccaggaagttcaagtccctgccgcctgggcaaacgcagttgatacatccacccgtacccccaccgggattgagtttgttgacaagatcatgcgcccgctgatggatttcaagggtgaccagctcccagtcagtgtgatgactcctggtggaaccttccctgtcgggacaacacagtatgccaagcgtgcaattgctgctttcattccccagtggattcctgccaactgcacacagtgcaactattgttcgtatgtttgcccccacgccaccatccgacctttcgtgctgacagaccaggaggtgcagctggccccggagagctttgtgacacgcaaggcgaagggtgattaccaggggatgaatttccgcatccaagttgctcctgaggattgcactggctgccaggtgtgcgtggagacgtgccccgatgatgccctggagatgaccgacgctttcaccgccacccctgtgcaacgcaccaactgggagttcgccatcaaggtgcccaaccgcggcaccatgacggaccgctactccctgaagggcagccagttccagcagcccctcctggagttctccggggcctgcgagggctgcggcgagaccccatatgtcaagctgctcacccagctcttcggcgagcggacggtcatcgccaacgccaccggctgcagttccatctggggtggcactgccggcctggcgccgtacaccaccaacgccaagggccagggcccggcctggggcaacagcctgttcgaggacaacgccgagttcggctttggcattgcagtggccaacgcccagaagaggtcccgcgtgagggactgcatcctgcaggcagtggagaagaaggtcgccgatgagggtttgaccacattgttggcgcaatggctgcaggattggaacacaggagacaagaccttgaagtaccaagaccagatcattgcagggctggcacagcagcgcagcaaggatccccttctggagcagatctatggcatgaaggacatgctgcctaacatcagccagtggatcattggtggtgatggctgggccaacgacattggtttcggtgggctggaccacgtgctggcctctgggcagaacctcaacgtcctggtgctggacaccgagatgtacagcaacaccggtgggcaggcctccaagtccacccacatggcctctgtggccaagtttgccctgggagggaagcgcaccaacaagaagaacttgacggagatggcaatgagctatggcaacgtctatgtggccaccgtctcccatggcaacatggcccagtgcgtcaaggcgtttgtggaggctgagtcttatgatggaccttcgctcattgttggctatgcgccatgcatcgagcatggtctgcgtgctggtatggcaaggatggttcaagagtctgaggctgccatcgccacgggatactggcccctgtaccgctttgacccccgcctggcgaccgagggcaagaaccccttccagctggactccaagcgcatcaagggcaacctgcaggagtacctggaccgccagaaccggtatgtcaacctgaagaagaacaacccgaagggtgcggatctgctgaagtctcagatggccgacaacatcaccgcccggttcaaccgctaccgacgcatgttggagggccccaatacaaaagccgccgcccccagcggcaaccatgtgaccatcctgtacggctccgaaactggcaacagtgagggtctggcaaaggagctggccaccgacttcgagcgccgggagtactccgtcgcagtgcaggctttggatgacatcgacgttgctgacttggagaacatgggcttcgtggtcattgcggtgtccacctgtgggcagggacagttcccccgcaacagccagctgttctggcgggagctgcagcgggacaagcctgagggctggctgaagaacttgaagtacactgtcttcgggctgggcgacagcacatactacttctactgccacaccgccaagcagatcgacgctcgcctggccgccttgggcgctcagcgggtggtgcccattggcttcggcgacgatggggatgaggacatgttccacaccggcttcaacaactggatccccagtgtgtggaatgagctcaagaccaagactccggaggaagcgctgttcaccccgagcatcgccgtgcagctcacccccaacgccaccccgcaggatttccatttcgccaagtccaccccagtgctgtccatcaccggtgccgaacgcatcacgccggcagaccacacccgcaacttcgtcactatccgatggaagaccgatttgtcgtaccaggtgggtgactctcttggtgtcttccctgagaacacccggtcagtggtggaggagttcctgcagtattacggcttgaaccccaaggacgtcatcaccatcgaaaacaagggcagccgggagttgccccactgcatggctgttggggatctcttcacgaaggtgttggacatcttgggcaaacccaacaaccggttctacaagaccctttcttactttgcagtggacaaggccgagaaggagcgcttgttgaagatcgccgagatggggccggagtacagcaacatcctgtctgagacgtaccactacgcggacatcttccacatgttcccgtccgcccggcccacgctgcagtacctcatcgagatgatccccaacatcaagccccggtactactccatctcctccgcccccatccacacccctggcgaggtccacagcctggtgctcatcgacacctggatcacgctgtccggcaagcaccgcacggggctgacctgcaccatgctggagcacctgcaggcgggccaggtggtggatggctgcatccaccccacggcgatggagttccccgaccacgagaagccggtggtgatgtgcgccatgggcagtggcctggcaccgttcgttgctttcctgcgcgacggctccacgctgcggaagcagggcaagaagaccgggaacatggcattgtacttcggcaacaggtatgagaagacggagttcctgatgaaggaggagctgaagggtcacatcaacgatggtttgctgacacttcgatgcgctttcagccgagatgaccccaagaagaaggtgtatgtgcaggaccttatcaagatggacgaaaagatgatgtacgattacctcgtggtgcagaagggttctatgtattgctgtggatcccgcagtttcatcaagcctgtccaggagtcattgaaacattgcttcatgaaagctggtgggctgactgcagagcaagctgagaacgaggtcatcgatatgttcacgaccgggcggtacaatatcgaggcatggtaataaatggaggcgctcgttgatctgagccttgccccctgacgaacggcggtggatggaagatactgctctcaagtgctgaagcggtagcttagctccccgtttcgtgctgatcagtctttttcaacacgtaaaaagcggaggagttttgcaattttgttggttgtaacgatcctccgttgattttggcctctttctccatgggcgggctgggcgtatttgaagcggttctctcttctgccgtta

SEQ ID NO: 18 - DNA, 1856 bp, Artificial Sequence
  Synthetic Construct- Sequence No. 18, Example 18: designer HydA1-promoter-linked Thiolase DNA construct (1856 bp)
agaaaatctggcaccacaccgagctgtcatgcgttgttccgttatgtgtcgtcaaacgccttcgagcgctgcccggaacaatgcgtactagtataggagccatgaggcaagtgaacagaagcgggctgactggtcaaggcgcacgatagggctgacgagcgtgctgacggggtgtaccgccgagtgtccgctgcattcccgccggattgggaaatcgcgatggtcgcgcataggcaagctcgcaaatgctgtcagcttatcttacatgaacacacaaacactctcgcaggcactagcctcaaatggccgccgtcattgccaagtcctccgtctccgcggccgtggctcgcccggcccgctccagcgtgcgccccatggccgcgctgaagcccgccgtcaaggctgcccccgtggctgccccggctcaggccaaccagatgaaagaagtagttattgcaagtggtgtaaggactgctgtcgggaaatttggtggcacgcttctaaatgtacctgcagtagatttaggtgctgtgaataataaaagaagcataaaaagagccaatgtgaaacctgaagatgttagtgaagtgataatgggaaatgtattgcaggcaggtcttgggcagaaccccgcaagacaagctgaaataaaagcgggcataccagtagaagttccggctatgactgtaaacatggtatgtggatcaggtcttagagctgtgacacttgctgctcaggcagttatgcttggtgatgctgacattgttgtagccggtggaatggaaaatatgtcaagagcaccatatatattaaatgatgctcgctttgggtacaggatgaacaatggccagcttgtagatgaaatggtatatgatggtttaacagatgtttttaaccaatatcacatgggaatcactgccgaaaatcttgctgaaaaatacggcatatcaagagaagagcaggatgaatttgcatatagaagccaaaaattagcgtcagaagcgatatcatcaggaagatttgaggatgagatagttcctgtgattgtgccgcagaaaaaaggtgaaccgatagaatttaaagttgatgaacatgtgagacctaatacgacaattgaagcacttgcaaaattaaaaccagcattccaaaaagatggaactgtaactgctggaaatgcatcaggaattaacgatgcagctgcagcagtagttgtgatgtcaaaagaaaaggcatgtgaacttggaataaagaccattgcaacgattaaatcatttggttatgcaggtgttgaccccagcatcacgggaattggtccagtatatgctacgagaaaggcattagaaaaagctaatctaactgtagatgatttagatttaattgaagcaaatgaagcatttgcagcacaatcactggctgttgcaaaagaattaaaatttaatatggacagagtgaatgtaaatggtggcgcaattgcgataggtcatccaatcggcgccagcggatgtagaattctagtgacgcttttatatgagatgcagaagaggaattcgcatactggacttgcaacattgtgcatcggcggaggaatgggaatagcaatggttgtcgaaagataaatggaggcgctcgttgatctgagccttgccccctgacgaacggcggtggatggaagatactgctctcaagtgctgaagcggtagcttagctccccgtttcgtgctgatcagtctttttcaacacgtaaaaagcggaggagttttgcaattttgttggttgtaacgatcctccgttgattttggcctctttctccatgggcgggctgggcgtatttgaagcggttctctcttctgccgtta

SEQ ID NO: 19 - DNA, 1550 bp, Artificial Sequence
  Synthetic Construct- Sequence No. 19, Example 19: designer HydA1-promoter-linked 3-Hydroxybutyryl-CoA-Dehydrogenase DNA construct (1550 bp)
agaaaatctggcaccacaccgagctgtcatgcgttgttccgttatgtgtcgtcaaacgccttcgagcgctgcccggaacaatgcgtactagtataggagccatgaggcaagtgaacagaagcgggctgactggtcaaggcgcacgatagggctgacgagcgtgctgacggggtgtaccgccgagtgtccgctgcattcccgccggattgggaaatcgcgatggtcgcgcataggcaagctcgcaaatgctgtcagcttatcttacatgaacacacaaacactctcgcaggcactagcctcaaatggccgccgtcattgccaagtcctccgtctccgcggccgtggctcgcccggcccgctccagcgtgcgccccatggccgcgctgaagcccgccgtcaaggctgcccccgtggctgccccggctcaggccaaccagatgcaaaagatttgtgtaataggtgctggaacaatgggctcaggcatcgctcaagtatttgcacaaaatggctttgaagtaattttacgcgatattgatatgaagttcgtagaaaaaggatttggcacaattgaaaaaatttacaaagaaatgttgacaaagggaaaattacagcagatgagaaaacgaattttaagcagaatcagaggtacaacaaatttggaagacgcaaaagaagcagattttgtagttgaagcggctatagaaaatatggatctcaagaaacaaatattcaaagagctagatgaaatatgcaaaatggaaacaatccttgcgtcaaatacatcatcactatccataacagaaatagcaagtgcgacaaaaagacctgagaaagtcataggaatgcatttcttcaacccagttccagtaatgaaacttgttgaagtcataaaaggattaaagacatcagagcaaacatttaatgtcgtcagagaattggctttaaaagtagacaaaacacctatagaggtcaaagaagcacctggatttgttgtaaataggattttaatcccaatgattaatgaagcaattggaatacttgcagtggtgttggcaactgacaagagcatagatgaagctatgaaacttggtgcaaatcatccaataggacctttggcattgtctagtttgataggcaatgacgtcgttcttgctataatgaatgtgctttatgaagagtacggcgattcgaaatacagaccacatccacttctaaaaaaagtggtaagaggcggattgctgggtagaaaaactggcaaaggtttctttgaatacaaaattaatcttttaaggaggagaatatcatgataaatggaggcgctcgttgatctgagccttgccccctgacgaacggcggtggatggaagatactgctctcaagtgctgaagcggtagcttagctccccgtttcgtgctgatcagtctttttcaacacgtaaaaagcggaggagttttgcaattttgttggttgtaacgatcctccgttgattttggcctctttctccatgggcgggctgggcgtatttgaagcggttctctcttctgccgtta

SEQ ID NO: 20 - DNA, 1457 bp, Artificial Sequence
  Synthetic Construct- Sequence No. 20, Example 20: designer HydA1-promoter-linked Crotonase DNA construct (1457 bp)
agaaaatctggcaccacaccgagctgtcatgcgttgttccgttatgtgtcgtcaaacgccttcgagcgctgcccggaacaatgcgtactagtataggagccatgaggcaagtgaacagaagcgggctgactggtcaaggcgcacgatagggctgacgagcgtgctgacggggtgtaccgccgagtgtccgctgcattcccgccggattgggaaatcgcgatggtcgcgcataggcaagctcgcaaatgctgtcagcttatcttacatgaacacacaaacactctcgcaggcactagcctcaaatggccgccgtcattgccaagtcctccgtctccgcggccgtggctcgcccggcccgctccagcgtgcgccccatggccgcgctgaagcccgccgtcaaggctgcccccgtggctgccccggctcaggccaaccagatggattttaataatgttttattaaataaggatgatgggatagctctcatcattataaatcgtccaaaggctttaaatgcattaaactatgagacactaaaagagttagatagtgtgcttgatatagttgaaaatgataaagagataaaagttttaattataactggcagcggtgaaaaaaccttcgttgcaggtgctgatatagctgagatgagtaatatgacaccacttgaagcgaagaagttctctctttatggacagaaagtatttaggaagatagaaatgctaagtaagcctgttatagcagcggtaaatggttttgcacttggtggtggatgcgagctttctatggcatgtgacatacgtattgcaagtaaaaatgcaaaatttggtcaacctgaagtaggacttggaataatacctggcttttcaggaactcaaagattaccacgtcttataggcacttctaaagctaaagagcttattttcacaggtgacatgataaattctgatgaagcatataaaataggccttatatctaaagttgttgaactatctgatctcattgaagaagcaaaaaaactcgcgaaaaaaatgatgtcaaaaagtcaaatagcaatttctctagcaaaggaagcaataaataagggaatggaaacagacttagatacaggcaatactatagaagctgagaaattttccttatgttttacaacagatgatcaaaaagaaggtatgattgcgttttctgaaaagagggcgcctaaatttggcaaataaatggaggcgctcgttgatctgagccttgccccctgacgaacggcggtggatggaagatactgctctcaagtgctgaagcggtagcttagctccccgtttcgtgctgatcagtctttttcaacacgtaaaaagcggaggagttttgcaattttgttggttgtaacgatcctccgttgattttggcctctttctccatgggcgggctgggcgtatttgaagcggttctctcttctgccgtta

SEQ ID NO: 21 - DNA, 1817 bp, Artificial Sequence
  Synthetic Construct- Sequence No. 21, Example 21: designer HydA1-promoter-linked Butyryl-CoA-Dehydrogenase DNA construct (1817 bp)
agaaaatctggcaccacaccgagctgtcatgcgttgttccgttatgtgtcgtcaaacgccttcgagcgctgcccggaacaatgcgtactagtataggagccatgaggcaagtgaacagaagcgggctgactggtcaaggcgcacgatagggctgacgagcgtgctgacggggtgtaccgccgagtgtccgctgcattcccgccggattgggaaatcgcgatggtcgcgcataggcaagctcgcaaatgctgtcagcttatcttacatgaacacacaaacactctcgcaggcactagcctcaaatggccgccgtcattgccaagtcctccgtctccgcggccgtggctcgcccggcccgctccagcgtgcgccccatggccgcgctgaagcccgccgtcaaggctgcccccgtggctgccccggctcaggccaaccagatggacttttcattaacaaaggagcaagaaatggtaaggcgtgttgtgagagaattcgctgaaaaagaagttgctcctaaagcaaaagaaatagatatcacagaagagtttccatgggatacagtaagaaaaatggctcaaaacgatatgatgggtattccttatccagaagagtatggtggagcaggtggagattacttgagttatatcatagctgttgaagagatatcaagagcttgtgctacgactggagtaattttatctgctcatacttcattgggaagttttccaatatatcaatggggaacagaagaacaaaaaagaaaatatctagtgccacttgcaaaaggtgaaaaattgggcgcttttggccttacagaacctaacgcaggtacagatgcagctggacagcagacaactgcagtattagatggtgatcactacgtattaaacggctcaatatttattacaaacggaggaaaagctgacatatatataatctttgcaatgacagacaaatcaaaaggcacaagaggcattagtgcatttatagttgagaaagattttccgggttttagcattggcaaaattgaagaaaaaatgggtataagagcttcatcaactgccgaacttgtgtttgaagattgtattgtaccaaaagaaaatttacttggtaaagaaggagaaggttttaaaattgcgatggctacactagatggtggaagaataggaatagcagcgcaacgccttggaatagctcaggctgctttagatgaagagataaaatatgcaaaggaaagacaacagtttggaagaccaattggaaaatttcaaggcattcaatggtatatagctgatatggcaacgagaataaatgcttcaagatggcttgtatacaatgccgcttggagaaagcaggtaggtcttccgtacacaatggaagcagctatggcaaaattatatgcttccgaaacagcaatgtttgtaacgacaaaaacagttcagatatttggcggctatggctttacaaaagattatccagtggaaagatttatgagagatgcaaaaataacagaaatttatgaaggcacatcggaagtccagaaaatggttatttccggtaacctattgaaaatgtaaatggaggcgctcgttgatctgagccttgccccctgacgaacggcggtggatggaagatactgctctcaagtgctgaagcggtagcttagctccccgtttcgtgctgatcagtctttttcaacacgtaaaaagcggaggagttttgcaattttgttggttgtaacgatcctccgttgattttggcctctttctccatgggcgggctgggcgtatttgaagcggttctctcttctgccgtta

SEQ ID NO: 22 - DNA, 2084 bp, Artificial Sequence
  Synthetic Construct- Sequence No. 22, Example 22: designer HydA1-promoter-linked Butyraldehyde-Dehydrogenase DNA construct (2084 bp)
agaaaatctggcaccacaccgagctgtcatgcgttgttccgttatgtgtcgtcaaacgccttcgagcgctgcccggaacaatgcgtactagtataggagccatgaggcaagtgaacagaagcgggctgactggtcaaggcgcacgatagggctgacgagcgtgctgacggggtgtaccgccgagtgtccgctgcattcccgccggattgggaaatcgcgatggtcgcgcataggcaagctcgcaaatgctgtcagcttatcttacatgaacacacaaacactctcgcaggcactagcctcaaatggccgccgtcattgccaagtcctccgtctccgcggccgtggctcgcccggcccgctccagcgtgcgccccatggccgcgctgaagcccgccgtcaaggctgcccccgtggctgccccggctcaggccaaccagatgattaaagacacgctagtttctataacaaaagatttaaaattaaaaacaaatgttgaaaatgccaatctaaagaactacaaggatgattcttcatgtttcggagttttcgaaaatgttgaaaatgctataagcaatgccgtacacgcacaaaagatattatcccttcattatacaaaagaacaaagagaaaaaatcataactgagataagaaaggccgcattagaaaataaagagattctagctacaatgattcttgaagaaacacatatgggaagatatgaagataaaatattaaagcatgaattagtagctaaatacactcctgggacagaagatttaactactactgcttggtcaggagataacgggcttacagttgtagaaatgtctccatatggcgttataggtgcaataactccttctacgaatccaactgaaactgtaatatgtaatagtataggcatgatagctgctggaaatactgtggtatttaacggacatccaggcgctaaaaaatgtgttgcttttgctgtcgaaatgataaataaagctattatttcatgtggtggtcctgagaatttagtaacaactataaaaaatccaactatggactctctagatgcaattattaagcacccttcaataaaactactttgcggaactggagggccaggaatggtaaaaaccctcttaaattctggtaagaaagctataggtgctggtgctggaaatccaccagttattgtagatgatactgctgatatagaaaaggctggtaagagtatcattgaaggctgttcttttgataataatttaccttgtattgcagaaaaagaagtatttgtttttgagaacgttgcagatgatttaatatctaacatgctaaaaaataatgctgtaattataaatgaagatcaagtatcaaagttaatagatttagtattacaaaaaaataatgaaactcaagaatactctataaataagaaatgggtcggaaaagatgcaaaattattcttagatgaaatagatgttgagtctccttcaagtgttaaatgcataatctgcgaagtaagtgcaaggcatccatttgttatgacagaactcatgatgccaatattaccaattgtaagagttaaagatatagatgaagctattgaatatgcaaaaatagcagaacaaaatagaaaacatagtgcctatatttattcaaaaaatatagacaacctaaataggtttgaaagagaaatcgatactactatctttgtaaagaatgctaaatcttttgccggtgttggttatgaagcagaaggctttacaactttcactattgctggatccactggtgaaggaataacttctgcaagaaattttacaagacaaagaagatgtgtactcgccggttaaatggaggcgctcgttgatctgagccttgccccctgacgaacggcggtggatggaagatactgctctcaagtgctgaagcggtagcttagctccccgtttcgtgctgatcagtctttttcaacacgtaaaaagcggaggagttttgcaattttgttggttgtaacgatcctccgttgattttggcctctttctccatgggcgggctgggcgtatttgaagcggttctctcttctgccgtta

SEQ ID NO: 23 - DNA, 1733 bp, Artificial Sequence
  Synthetic Construct- Sequence No. 23, Example 23: designer HydA1-promoter-linked Butanol-Dehydrogenase DNA construct (1733 bp)
agaaaatctggcaccacaccgagctgtcatgcgttgttccgttatgtgtcgtcaaacgccttcgagcgctgcccggaacaatgcgtactagtataggagccatgaggcaagtgaacagaagcgggctgactggtcaaggcgcacgatagggctgacgagcgtgctgacggggtgtaccgccgagtgtccgctgcattcccgccggattgggaaatcgcgatggtcgcgcataggcaagctcgcaaatgctgtcagcttatcttacatgaacacacaaacactctcgcaggcactagcctcaaatggccgccgtcattgccaagtcctccgtctccgcggccgtggctcgcccggcccgctccagcgtgcgccccatggccgcgctgaagcccgccgtcaaggctgcccccgtggctgccccggctcaggccaaccagatgaaaggttttgcaatgctaggtattaataagttaggatggatcgaaaaagaaaggccagttgcgggttcatatgatgctattgtacgcccattagcagtatctccgtgtacatcagatatacatactgtttttgagggagctcttggagataggaagaatatgattttagggcatgaagctgtaggtgaagttgttgaagtaggaagtgaagtgaaggattttaaacctggtgacagagttatagttccttgtacaactccagattggagatctttggaagttcaagctggttttcaacagcactcaaacggtatgctcgcaggatggaaattttcaaatttcaaggatggagtttttggtgaatattttcatgtaaatgatgcggatatgaatcttgcgattctacctaaagacatgccattagaaaatgctgttatgataacagatatgatgactactggatttcatggagcagaacttgcagatattcaaatgggttcaagtgttgtggtaattggcattggagctgttggcttaatgggaatagcaggtgctaaattacgtggagcaggtagaataattggagtggggagcaggccgatttgtgttgaggctgcaaaattttatggagcaacagatattctaaattataaaaatggtcatatagttgatcaagttatgaaattaacgaatggaaaaggcgttgaccgcgtaattatggcaggcggtggttctgaaacattatcccaagcagtatctatggttaaaccaggaggaataatttctaatataaattatcatggaagtggagatgctttactaataccacgtgtagaatggggatgtggaatggctcacaagactataaaaggaggtctttgtcctgggggacgtttgagagcagaaatgttaagagatatggtagtatataatcgtgttgatctaagtaaattagttacacatgtatatcatggatttgatcacatagaagaagcactgttattaatgaaagacaagccaaaagacttaattaaagcagtagttatattataaatggaggcgctcgttgatctgagccttgccccctgacgaacggcggtggatggaagatactgctctcaagtgctgaagcggtagcttagctccccgtttcgtgctgatcagtctttttcaacacgtaaaaagcggaggagttttgcaattttgttggttgtaacgatcctccgttgattttggcctctttctccatgggcgggctgggcgtatttgaagcggttctctcttctgccgtta

SEQ ID NO: 24 - DNA, 1556 bp, Artificial Sequence
  Synthetic Construct- Sequence No. 24, Example 24: designer Fructose-Diphosphate-Aldolase DNA construct (1556 bp)
agaaaatctggcaccacaccatggtagggtgcgagtgaccccgcgcgacttggaagggttcaaacgaccccgccgtacgaacttttgtcggggggcgctcccggatggtagggtgcgagtgaccccgcgcgacttggaagggttcaaacgaccccgccgtacgaacttttgtcggggggcgctcccggatggccctgatgatgaagtcgtcggccagcctgaaggctgtgtcgctggccgctctcgccgcgccgtcgttgtgcgcgccgggcaagtacgatgaggagctgattaagaccgctggcaccgttgcctccaagggccgcggtatcctggccatggacgagtcaaacgccacctgcggcaaacgcctggactccatcggcgtggagaacaccgaggagaaccgccgcgcctaccgcgagctgctggtgaccgcccccggcctgggccagtacatctccggcgctatcctgttcgaggagaccctgtatcagtccaccgcctccggcaagaagttcgtcgatgtgatgaaggagcagaacatcgtgcccggcatcaaggtcgacaagggcctggtgccctgtccaacaccaacgatgagctggtgcatgggcctggacggctggacaagcgctgctgagtactacaaggccggcgctcgcttcgccaagtggcgctcggtcgtctcgatcccccacggcccctcgatcatgctgccgcgactggcctacggcctggcccgctacgccgccatcgcccagaacgccggtctggtgcccattgtggagcccgaggtcctgctggacggtgagcacgacatcgaccgctgcctggaggtgcaggaggccatctgggccgagaccttcaagtacatggccgacaacaaggtcatgttgcagggtatcctgctgaagcccgccatggtcacccccggcgctgactgcaagaacaaggccggccccgccaaggttgccgagtacaccctgaagatgctggccgcgcgtgcccccccggtccccggcatcatgttcctgtcgggcggccagtccgagctggagtcgaccctgaacctgaacgccatgaaccagagccccaacccgtggcacgtgtcgttctcgtacgcccgcgctctgacgaacaccgttctgaagacctggcaggcaagcccgagaacggtccaggcgcccaggctcgctgctcaagcgcgcaaggccaactcggacgctcagcagggcaagtacgacgccaccaccgagggcaaggaggctgcccagggcatgtacgagaagggaaaaggctacgtctactaataaatggaggcgctcgttgatctgagccttgccccctgacgaacggcggtggatggaagatactgctctcaagtgctgaagcggtagcttagctccccgtttcgtgctgatcagtctttttcaacacgtaaaaagcggaggagttttgcaattttgttggttgtaacgatcctccgttgattttggcctctttctccatgggcgggctgggcgtatttgaagcggttctctcttctgccgtta

SEQ ID NO: 25 - DNA, 1379 bp, Artificial Sequence
  Synthetic Construct- Sequence No. 25, Example 25: designer Triose-Phosphate-Isomerase DNA construct (1379 bp)
agaaaatctggcaccacaccatggtagggtgcgagtgaccccgcgcgacttggaagggttcaaacgaccccgccgtacgaacttttgtcggggggcgctcccggatggtagggtgcgagtgaccccgcgcgacttggaagggttcaaacgaccccgccgtacgaacttttgtcggggggcgctcccggatggcagctacctctctcactgcccctccttctttctccggtctccgccgcatttctcccaagctcgacgctgccgccgtctcctcccaccaatccttcttccaccgcgtcaattcctctacccgtctcgtttcttcctcttcttcttctcatcgctcccccagaggtgttgttgccatggctggatccggaaagtttttcgttggaggaaactggaagtgtaacgggactaaggactccatcgccaagcttatctccgatctcaacagtgcaaccttggaagcagatgtagatgttgttgtgtcacctccatttgtctacatcgaccaggtcaaatcctcgttgacagaccgtattgacatatcaggtcagaactcttgggttgggaaaggtggagccttcactggtgaaatcagcgtggaacagctcaaagaccttggctgcaagtgggtcattcttgggcattccgaacggagacatgtcatcggagaaaaagatgagtttatcgggaagaaagctgcatatgcattgagtgagggtcttggagtgatagcttgtattggggaaaagctagaagagagggaagcaggcaagacgtttgatgtttgcttcgcgcaactgaaggcgtttgctgatgctgtgcctagctgggacaatatagttgttgcatacgagcctgtatgggcaattggaactggtaaagttgcatctcctcagcaagcacaagaagtccatgtagctgtccgcggttggctaaagaagaatgtctctgaggaagttgcttccaaaacgagaatcatatatggaggttctgtcaatggaggcaacagtgcagagcttgccaaagaagaagacattgatggatttcttgttggtggtgcctccttgaagggtcctgagtttgcaaccattgtgaactcagtcacgtcgaagaaagttgctgcttgataaatggaggcgctcgttgatctgagccttgccccctgacgaacggcggtggatggaagatactgctctcaagtgctgaagcggtagcttagctccccgtttcgtgctgatcagtctttttcaacacgtaaaaagcggaggagttttgcaattttgttggttgtaacgatcctccgttgattttggcctctttctccatgggcgggctgggcgtatttgaagcggttctctcttctgccgtta

SEQ ID NO: 26 - DNA, 2156 bp, Artificial Sequence
  Synthetic Construct- Sequence No. 26, Example 26: designer Phosphofructose-Kinase DNA construct (2156 bp)
agaaaatctggcaccacaccatggtagggtgcgagtgaccccgcgcgacttggaagggttcaaacgaccccgccgtacgaacttttgtcggggggcgctcccggatggtagggtgcgagtgaccccgcgcgacttggaagggttcaaacgaccccgccgtacgaacttttgtcggggggcgctcccggatggccgccgtcattgccaagtcctccgtctccgcggccgtggctcgcccggcccgctccagcgtgcgccccatggccgcgctgaagcccgccgtcaaggctgcccccgtggctgccccggctcaggccaaccagatggaagcttcgatttcgtttctggggtcaacaaaacccaatatttccttgtttaacccttcttcaaacgtccttcctcgtagagatttccctcttcctgctttgaaattgaagaaagtttcagtgctgcctcgaatcttgcaccagaaacgactcatcagagctcagtgctctgatggattcaaaccagaggaagacgatgggtttgtcctagaagacgttcctcacttgaccaaatttctccctgatttaccgtcatatccaaatccattgaaagaaagccaagcatatgccattgttaagcgaacttttgtcagttccgaagatgtggttgcgcaaaatattgtagtccagaagggaagtaagcgaggagtacactttaggcgagcagggcctcgagaaagagtgtacttcagatcagatgaagtaaaagcttgcatagtgacttgtgggggcttgtgccctggaatcaatactgttatacgggaaattgtatgtggattgaacaatatgtatggtgttaataacattctcggcattcagggaggatatagaggcttttactccaaaaacactatgaacctgacacctaaagtagttaacgatattcataaacgcggtggcacttttcttcaaacctcaagaggaggacatgatacagcgaagattgttgataatattcaagatagaggaataaatcaggtatatattattggaggtggtgggacgcaaaagggtgcagagaagatatacgaggaagttgagaggcgtggtcttcaagtggcggtttctggcattcctaagacaattgataatgatattgctgtgattgacaaatcatttggctttgatacggcggttgaggaagcacaacgagctattaatgctgcacatgtagaggtcgagagcgtggaaaatggagttggtatcgttaaactcatgggcagatacagtggttttattgccatgattgcaactttagcgaatcgtgatgtggattgttgcttgattccagagtctccattttttcttgaaggaaagggtgggctctttgagtttattgaagaacgactcaaagagaataggcacatggttattgtgatagctgaaggagctggacaggattatgttgctcaaagcatgcgtgcatctgaaactaaagacgcctcaggaaatagactcttgcttgatgttggtctatggttgactcaacagataaaggatcactttacaaatgttcggaaaatgatgataaatatgaagtacatagacccaacgtatatgataagagcaataccgagtaacgcatcagacaatgtctattgcactcttcttgcccaaagtgcagttcatggagcaatggctgggtactcaggtttcactgtaggaccagttaacagtagacatgcttacatcccaatttctgtgacggaagtgacaaatacggtgaagttaactgataggatgtgggctagactccttgcatcgacaaatcaaccgagtttcttgactggtgaaggagcattgcagaatgtgatcgacatggaaactcaagaaaagatcgataacatgaagatctcttctatctaataaatggaggcgctcgttgatctgagccttgccccctgacgaacggcggtggatggaagatactgctctcaagtgctgaagcggtagcttagctccccgtttcgtgctgatcagtctttttcaacacgtaaaaagcggaggagttttgcaattttgttggttgtaacgatcctccgttgattttggcctctttctccatgggcgggctgggcgtatttgaagcggttctctcttctgccgtta

SEQ ID NO: 27 - DNA, 860 bp, Artificial Sequence
  Synthetic Construct- Sequence No. 27, Example 27: designer Nia1-promoter-linked Starch-Synthase-iRNA DNA construct (860 bp)
agaaaatctggcaccacacctatatggtagggtgcgagtgaccccgcgcgacttggagctcgatggccccgggttgtttggggcgtccgcctctcgcgctattctgagctggagaccgaggcgcatgaaaatgcattcgcttccataggacgctgcattgtggcttgaaggttcaagggaagggttcaaacgaccccgccgtacgaacttttgtcggggggcgctcccggccccgggctcttgtgcgcgcattagggcttcgggtcgcaagcaagacgatacatgccagccggctcaccaccgccaccagcggcttgcgggggtccacctccaggcccagacccttctgcagaaactccttgcacagcgccttcccggcggggcggtcggcgtcgaagttggctggcagcagcgcgtcagtggccgggttccactcctcacagtcaatgccgttcaggatgccgtggaacttggagcgcagctcggggcgcgcgaaggtggatctcgccgtcccagcggtagcccttgggcacctcgatgtcgcattcgtgcttgaggccctcaatctggtccttgggcaggcactcgtagaacggcagcatgaccgtcacgaagtgtaaatggaggcgctcgttgatctgagccttgccccctgacgaacggcggtggatggaagatactgctctcaagtgctgaagcggtagcttagctccccgtttcgtgctgatcagtctttttcaacacgtaaaaagcggaggagttttgcaattttgttggttgtaacgatcctccgttgattttggcctctttctccatgggcgggctgggcgtatttgaagcggttctctcttctgccgtta

SEQ ID NO: 28 - DNA, 1328 bp, Artificial Sequence
  Synthetic Construct- Sequence No. 28, Example 28: designer HydA1-promoter-linked Starch-Synthase-iRNA DNA construct (1328 bp)
agaaaatctggcaccacaccgagctgtcatgcgttgttccgttatgtgtcgtcaaacgccttcgagcgctgcccggaacaatgcgtactagtataggagccatgaggcaagtgaacagaagcgggctgactggtcaaggcgcacgatagggctgacgagcgtgctgacggggtgtaccgccgagtgtccgctgcattcccgccggattgggaaatcgcgatggtcgcgcataggcaagctcgcaaatgctgtcagcttatcttacatgaacacacaaacactctcgcaggcactagcctcaaatgaagagcttcatgcggagggatgcgctcggcgcggggctccgcggtgcagccagcacaaagcccgtctcaagggtcgccagcgtgaggcctgcgcctaccgcctaccgcactgcctgccaagttgcgaaggtggatgaaatggtgtcggtggatgaggagcttactcgtctccgcaaggagaacgagctcctgcgcgcccaactggcgctgtaccagcagaaccagcagccgtccgtgggtgccgctgccgttgccccgcctgctgccgccacgaaggtgctggagaagccggcgccgtaagtaacctaacggtgagcagcatgcaatattttagcgtcgatactcggaaactataggagcgcatcagccgaccgatgttcgcgttgctgtcgcaggcccaaccgtgccaccgccgtggtgtgcaaggcgcagaaggcggccaggccgccgctgccgctgctctggccataagtaacctaacggcgccggcttctccagcaccttcgtggcggcagcaggcggggcaacggcagcggcacccacggacggctgctggttctgctggtacagcgccagttgggcgcgcaggagctcgttctccttgcggagacgagtaagctcctcatccaccgacaccatttcatccaccttcgcaacttggcaggcagtgcggtaggcggtaggcgcaggcctcacgctggcgacccttgagacgggctttgtgctggctgcaccgcggagccccgcgccgagcgcatccctccgcatgaagctcttcattaaatggaggcgctcgttgatctgagccttgccccctgacgaacggcggtggatggaagatactgctctcaagtgctgaagcggtagcttagctccccgtttcgtgctgatcagtctttttcaacacgtaaaaagcggaggagttttgcaattttgttggttgtaacgatcctccgttgattttggcctctttctccatgggcgggctgggcgtatttgaagcggttctctcttctgccgtta

SEQ ID NO: 29 - DNA, 1889 bp, Artificial Sequence
  Synthetic Construct- Sequence No. 29, Example 29: designer Amylase DNA construct (1889 bp)
agaaaatctggcaccacaccatggtagggtgcgagtgaccccgcgcgacttggaagggttcaaacgaccccgccgtacgaacttttgtcggggggcgctcccggatggtagggtgcgagtgaccccgcgcgacttggaagggttcaaacgaccccgccgtacgaacttttgtcggggggcgctcccggctcgagcatatggccgccgtcattgccaagtcctccgtctccgcggccgtggctcgcccggcccgctccagcgtgcgccccatggccgcgctgaagcccgccgtcaaggctgcccccgtggctgccccggctcaggccaaccagatggcgaacaaacacatgtccctttctctcttcatcgtcctccttggcctctcgtgcagcttggcctccgggcaagtcctgtttcagggttttaactgggagtcgtggaagcacaatggcgggtggtacaacttcctgatgggcaaggtggacgacatcgccgccgctggcgtcacgcacgtgtggctccccccggcgtcgcagtccgtcgccgagcaagggtacatgccgggccggctctacgacctggacgcctccaagtacggcaacaaggcgcagctcaagtccctcatcggcgcgctccacggcaagggcgtcaaggccatcgccgacatcgtcatcaaccaccgcacggcggagcgcaaggacggccggggcatctactgcatcttcgagggcggcaccccggacgcgcgcctcgactggggcccccacatgatctgccgcgacgaccggccctacgccgacggcaccggcaacccggacaccggcgccgacttcggggccgcgccggacatcgaccacctcaacccgcgcgtccagaaggagctcgtcgagtggctcaactggctcaggaccgacgtcggcttcgacggctggcgcttcgacttcgccaagggctactccgcggacgtggccaagatctacgtcgaccgctccgagcccagcttcgccgtcgccgagatatggacgtcgctggcgtacggcggggacggcaagccgaacctcaaccaggacccgcaccggcaggagctggtgaactgggtgaacaaggtgggcggctccggccccgccaccacgttcgacttcaccaccaagggcatcctcaacgtggccgtggagggcgagctgtggcgcctgcgcggcaccgacggcaaggcgccgggcatgatcgggtggtggccggccaaggcggtgaccttcgtcgacaaccacgacaccggctccacgcagcacatgtggcccttcccttccgacagggtcatgcagggatatgcctacatcctcacgcacccagggaccccatgcatcttctacgatcatttcttcgactggggcttgaaggaggagatcgatcgtctggtgtcaatcaggacccgacaggggatacacagtgagagcaagctgcagatcatggaggccgacgccgacctttaccttgccgagatcgacggcaaggtcatcgtcaagctcgggccaagatacgatgtcggacacctcattcctgaaggcttcaaggtggtcgcgcatggcaatgactatgccgtatgggagaaagtataaggctgctgccccggctgctgctaatctagataaatggaggcgctcgttgatctgagccttgccccctgacgaacggcggtggatggaagatactgctctcaagtgctgaagcggtagcttagctccccgtttcgtgctgatcagtctttttcaacacgtaaaaagcggaggagttttgcaattttgttggttgtaacgatcctccgttgattttggcctctttctccatgggcgggctgggcgtatttgaagcggttctctcttctgccgtta

SEQ ID NO: 30 - DNA, 3089 bp, Artificial Sequence
  Synthetic Construct- Sequence No. 30, Example 30: designer Starch-Phosphorylase DNA construct (3089 bp)
agaaaatctggcaccacaccatggtagggtgcgagtgaccccgcgcgacttggaagggttcaaacgaccccgccgtacgaacttttgtcggggggcgctcccggatggtagggtgcgagtgaccccgcgcgacttggaagggttcaaacgaccccgccgtacgaacttttgtcggggggcgctcccggatggccgccgtcattgccaagtcctccgtctccgcggccgtggctcgcccggcccgctccagcgtgcgccccatggccgcgctgaagcccgccgtcaaggctgcccccgtggctgccccggctcaggccaaccagatggcggatgcgaaagcaaacggaaagaatgaggcggccaaactggcgaaaattccggcggctgcgaatccattggctaatgaaccatcggcgattgcatcaaatataagttaccacgtgcagtacagtcctcatttctcgccgactaagttcgagccggagcaagctttctttgccacggcggaggttgtccgcgatcgtcttattcaacaatggaatgagacataccaccattttaataaagttgatccgaagcaaacatactacctatcaatggaatttcttcaaggaaggactttgactaatgcaattggcagtttggacattcagaatgcatatgctgatgctttaaataatttggggcatgtccttgaggagatagctgaacaggaaaaagatgctgcactaggaaatggtgggctgggcaggctagcttcatgcttcttagactccatggcaacattgaatttgcctgcatggggttatggtttgagataccggtatgggctgttcaagcagaagatcaccaagcagggtcaagaagaagttgctgaagattggcttgagaaatttagtccttgggaagttgtcaggcatgatgtggtatttccggtcagattttttgggagtgttatggttaatccaaatggaacgagaaaatgggttgggggtgaagttgtccaagccgtagcttatgatataccaattccagggtacaaaaccaagaacactatcagtcttcgtctctgggacgctaaagctagcgctgaggatttcaatttatttcagtttaatgatggacaatacgaatctgctgcacagcttcattctcgagctcaacagatttgtgctgtgctctaccccggggattctactgaagaagggaagcttttaaggctgaaacaacaattctttctctgcagtgcttcacttcaggatatgattcttagattcaaggagaggaaaagtggaaggcagtggtctgaatttcccagcaaggtagctgtacaactgaatgatactcatccaacacttgcaattccagagttgatgcgattgctaatggatgaggaaggacttggatgggatgaagcatgggatataacaacaaggactgttgcttataccaatcacacagtacttcctgaagcacttgagaagtggtcacaagcagtaatgtggaagcttcttcctcgccatatggaaataattgaagagattgacaagagattcattgcaatggtccgctccacaaggagtgaccttgagagtaagattcccagcatgtgcatcttggataataatcccaaaaagccggttgttaggatggcaaacttatgtgtagtatctgcgcatacggtaaatggtgttgctcagttgcacagtgatatcttaaaggccgacttgttcgctgactatgtttctctatggccaaacaaactccaaaataaaactaatggcattactcctcgtcgatggctccggttttgcaatcctgagctcagcaaaattatcacaaaatggttaaaaaccgatcagtgggttacgaaccttgacctgcttgtaggtcttcgtcagtttgctgacaacacagaactccaagctgaatgggaatctgctaagatggccagtaagaaacatttggcagactacatatggcgagtaaccggtgtaacgattgatcctaatagcttatttgacatacaagtcaagcgcattcatgaatacaagagacaactgctaaatattttgggcgcaatctacagatacaagaagttgaaggagatgagccctcaggagcggaagaaaactactccacgcaccattatgtttggagggaaagcatttgcaacatatacaaacgcaaaaagaatagtaaagttggttaatgatgttggtgaagtcgtcaacaccgatcctgaggtcaatagttatttgaaggtggtatttgttccaaattacaatgtctctgttgcggagttgcttattccaggaagtgagctatctcagcatattagcacagcaggcatggaggcaagtggcacaagcaacatgaaattttctctaaatggttgcctcattataggaacattggatggagctaatgtggaaatcaggcaggagataggagaggagaatttctttctctttggtgcaggagcagaccaagtccctaagctgcggaaggaaagagaagatggattgttcaaaccagatcctcggtttgaagaggccaagcaatttataagaagtggagcatttggaagctatgactacaacccgcttcttgattccctggaggggaacactggttatggtcgtggtgattattttctagttggttatgacttcccaagttacttagaggctcaggacagagttgaccaagcttacaaggaccggaagaagtggctgaagatgtctatattaagtacagctggcagtgggaaattcagcagtgatcgcacaattgcacagtatgctaaggaaatctggaacataacagaatgccgtacatcatgataaatggaggcgctcgttgatctgagccttgccccctgacgaacggcggtggatggaagatactgctctcaagtgctgaagcggtagcttagctccccgtttcgtgctgatcagtctttttcaacacgtaaaaagcggaggagttttgcaattttgttggttgtaacgatcctccgttgattttggcctctttctccatgggcgggctgggcgtatttgaagcggttctctcttctgccgtta

SEQ ID NO: 31 - DNA, 1949 bp, Artificial Sequence
  Synthetic Construct- Sequence No. 31, Example 31: designer Hexose-Kinase DNA construct (1949 bp)
agaaaatctggcaccacaccatggtagggtgcgagtgaccccgcgcgacttggaagggttcaaacgaccccgccgtacgaacttttgtcggggggcgctcccggatggtagggtgcgagtgaccccgcgcgacttggaagggttcaaacgaccccgccgtacgaacttttgtcggggggcgctcccggatggccgccgtcattgccaagtcctccgtctccgcggccgtggctcgcccggcccgctccagcgtgcgccccatggccgcgctgaagcccgccgtcaaggctgcccccgtggctgccccggctcaggccaaccagatggctataacaccccgccgaaaaccttcccggaagggatcaatggctgatatgccgaaggatgtgcttgaccagctcaagacgctggaagagctcttcacagttgaccaggagaagctgaagcagatcgttgagcatttcatcaaggagttacagaagggcctcagtgtcgaaggcggaaacattcccatgaacgtgacttgggttctgggatttcccactggccatgagaaaggtacatttctggctctggacatggggggcaccaacctgcgcgtctgcgaaattgagctctccgaagagaagggcgagtttgatgtcacacagtccaagtatcgaatccccgaagagctcaagagcggtgaatcatcagaactatgggaatatattgccgactgtgtacagcagttcatagaatactaccatgacggttgcacggctttgccagacctgccgctgggctttaccttttcgtaccctgctactcaagaatatgttgaccacggtgtcctacagagatggaccaagggttttgatattgacggcgtcgagggcaaagacgtcgtcccaatgttagaagaagctttggctaagaaggttaaaaattcagctctttccccatttttctttggctatatggtgctaattactttacagggtctccccattaaagttgccgctctagtaaacgacacgactggcacacttattgcttccgcctacactgacccagagatgaaaatcggctgtatcttcggcacaggcgtcaacgccgcctacatggaaaatgcgggctctatccctaaaatagcccactacaatttacctcccgacaccccagtcgctatcaactgcgaatacggcgccttcgacaacgaactcattgtcctcccccgaacgcagtatgacgacgtatcccaactacgtaaaccatactccctggactcctccttcctagccttcatcgaagaagatcccttcgagaacctgtcagaaacgcgagatctcttcgaacgcaccctggggatctacgcattgccctcggagctagaattctgcagacgcctggcggaattgatcggcacacgtgccgcacgcctctccgcttgcggtgttgcggccatctgcaagaagaaaaatatcacccattgccatgtcggagcggacgggtcggtgttcgagaagtacccgcatttcaaggccaggggcgccagagccctgcgggagatccttgactggccagatagtgaaccggatcgggttgtgatgagcggagcggaggatgggtctggcgttggtgcggcgcttattgcggctttgacgcttgagagggttaaacaagcttcttgggaatggaagtacatcggaagcggtctgtcttaataaatggaggcgctcgttgatctgagccttgccccctgacgaacggcggtggatggaagatactgctctcaagtgctgaagcggtagcttagctccccgtttcgtgctgatcagtctttttcaacacgtaaaaagcggaggagttttgcaattttgttggttgtaacgatcctccgttgattttggcctctttctccatgggcgggctgggcgtatttgaagcggttctctcttctgccgtta

SEQ ID NO: 32 - DNA, 2249 bp, Artificial Sequence
  Synthetic Construct- Sequence No. 32, Example 32: designer Phosphoglucomutase DNA construct (2249 bp)
agaaaatctggcaccacaccatggtagggtgcgagtgaccccgcgcgacttggaagggttcaaacgaccccgccgtacgaacttttgtcggggggcgctcccggatggtagggtgcgagtgaccccgcgcgacttggaagggttcaaacgaccccgccgtacgaacttttgtcggggggcgctcccggatggccgccgtcattgccaagtcctccgtctccgcggccgtggctcgcccggcccgctccagcgtgcgccccatggccgcgctgaagcccgccgtcaaggctgcccccgtggctgccccggctcaggccaaccagatgtccgatttctccgtccagaccattgccaccacggccttcacagaccaaaagcctggaacctctggtctcagaaagaaagttactgtgtttcaacagcctcactacactgaaaacttcattcaggctattctcgatgccattccggaaggtgcccaaggtgccactcttgttgtaggaggtgatggccgtttctacaacgacaaggtcatcaacttgatcgccaaaatcgcctcggccaacggagtttccaagttgattttgggtcaagacgggattctttccactccagcaacttcgcatgtaatcaggatcaggggtgcaactggaggaattattctcactgcttcacacaaccccggaggccccaaaaacgatttgggtattaagtacaacttgggaaacggtgcaccagctccagaatcggttaccaacaagatctatgatgtctccaaggaattgacttcgtacaagctcattgatttacccgacattgatttgtccaaaacccagaccgtgcaattgggccctcttgaagtggaaatcattgactccacctctgattacgtagccatgttgaaggatatctttgacttccccttgatcaagtcgttcctcgagactgccactaaggagcagggattcaaggttttatttgattcgctcaatggtgtcactggcccctacggctacaagatcttcgttgaagaattaggattgcctcttaactcaatccaaaattaccacccattgcctgactttggtggtttacacccagatccaaacttgacctatgctcatactttggtcgagagggtcgataaggagaatattgcctttggtgctgcatctgatggtgacggtgacagaaacatgatctacggtgctggtacctttgtttcgcctggtgactctgtagccatcatctcggaatacgccgattccatcccttacttcaagaagcaaggtgtctacggtttggccagatccatgcctacctctggagccatcgatttggtagcaaaggctaaaggattgaatgtttacgaagtgccaaccggttggaagttcttctgcaaccttttcgacgctgacaagttgagtatctgtggtgaagagtcgtttggaacaggctccaaccacatcagagaaaaggacggcctttgggctgtagttgcctggttgaacgtgctagcagattacaacgtcaagaatccagaatccaagacatctatttctgtagtgcagaactcgttttggaagaaatacggaagaactttcttcactagatatgactacgaaaacgtatcgtctgaaggtgctgccgagctcatcaacttgttgtcttctattgttgactctaagaaaccaggaagtagcttagctgatggctacgtcgtcaaggaagctgctaacttctcgtacaccgatttggacggctctgtttcgtccaaccaaggtttgttcatcaagtttgaaagcggcttgagattcatagtaagattgtctggtactggatcatccggtgctacagtcagattatatctcgaaaagcactctgccgacgaatccacctatggcttaggcgtagaccagtacttagttgatgacatcaagtttgtcttggacttgttgaagttcaagcagttcttgggaaaggatgaaccagatgttcgtacctagtaaatggaggcgctcgttgatctgagccttgccccctgacgaacggcggtggatggaagatactgctctcaagtgctgaagcggtagcttagctccccgtttcgtgctgatcagtctttttcaacacgtaaaaagcggaggagttttgcaattttgttggttgtaacgatcctccgttgattttggcctctttctccatgggcgggctgggcgtatttgaagcggttctctcttctgccgtta

SEQ ID NO: 33 - DNA, 2231 bp, Artificial Sequence
  Synthetic Construct- Sequence No. 33, Example 33: designer Glucosephosphate-Isomerase DNA construct (2231 bp)
agaaaatctggcaccacaccatggtagggtgcgagtgaccccgcgcgacttggaagggttcaaacgaccccgccgtacgaacttttgtcggggggcgctcccggatggtagggtgcgagtgaccccgcgcgacttggaagggttcaaacgaccccgccgtacgaacttttgtcggggggcgctcccggatggccgccgtcattgccaagtcctccgtctccgcggccgtggctcgcccggcccgctccagcgtgcgccccatggccgcgctgaagcccgccgtcaaggctgcccccgtggctgccccggctcaggccaaccagatgtccaataactcattcactaacttcaaactggccactgaattgccagcctggtctaagttgcaaaaaatttatgaatctcaaggtaagactttgtctgtcaagcaagaattccaaaaagatgccaagcgttttgaaaaattgaacaagactttcaccaactatgatggttccaaaatcttgttcgactactcaaagaacttggtcaacgatgaaatcattgctgcattgattgaactggccaaggaggctaacgtcaccggtttgagagatgctatgttcaaaggtgaacacatcaactccactgaagatcgtgctgtctaccacgtcgcattgagaaacagagctaacaagccaatgtacgttgatggtgtcaacgttgctccagaagtcgactctgtcttgaagcacatgaaggagttctctgaacaagttcgttctggtgaatggaagggttataccggtaagaagatcaccgatgttgttaacatcggtattggtggttccgatttgggtccagtcatggtcactgaggctttgaagcactacgctggtgtcttggatgtccacttcgtttccaacattgacggtactcacattgctgaaaccttgaaggttgttgacccagaaactactttgtttttgattgcttccaagactttcactaccgctgaaactatcactaacgctaacactgccaagaactggttcttgtcgaagacaggtaatgatccatctcacattgctaagcatttcgctgctttgtccactaacgaaaccgaagttgccaagttcggtattgacaccaaaaacatgtttggtttcgaaagttgggtcggtggtcgttactctgtctggtcggctattggtttgtctgttgccttgtacattggctatgacaactttgaggctttcttgaagggtgctgaagccgtcgacaaccacttcacccaaaccccattggaagacaacattccattgttgggtggtttgttgtctgtctggtacaacaacttctttggtgctcaaacccatttggttgctccattcgaccaatacttgcacagattcccagcctacttgcaacaattgtcaatggaatctaacggtaagtctgttaccagaggtaacgtgtttactgactactctactggttctatcttgtttggtgaaccagctaccaacgctcaacactctttcttccaattggttcaccaaggtaccaagttgattccatctgatttcatcttagctgctcaatctcataacccaattgagaacaaattacatcaaaagatgttggcttcaaacttctttgctcaagctgaagctttaatggttggtaaggatgaagaacaagttaaggctgaaggtgccactggtggtttggtcccacacaaggtcttctcaggtaacagaccaactacctctatcttggctcaaaagattactccagctactttgggtgctttgattgcctactacgaacatgttactttcactgaaggtgccatttggaatatcaactctttcgaccaatggggtgttgaattgggtaaagtcttggctaaagtcatcggcaaggaattggacaactcctccaccatttctacccacgatgcttctaccaacggtttaatcaatcaattcaaggaatggatgtgataaatggaggcgctcgttgatctgagccttgccccctgacgaacggcggtggatggaagatactgctctcaagtgctgaagcggtagcttagctccccgtttcgtgctgatcagtctttttcaacacgtaaaaagcggaggagttttgcaattttgttggttgtaacgatcctccgttgattttggcctctttctccatgggcgggctgggcgtatttgaagcggttctctcttctgccgtta

SEQ ID NO: 34 - DNA, 1709 bp, Artificial Sequence
  Synthetic Construct- Sequence No. 34, Example 34: designer oxyphotobacterial Butanol Dehydrogenase DNA construct (1709 bp)
agaaaatctggcaccacaccatccaaactcgccacccgcaaaccaatggcatggccgagcgctgcaacggtcgcattgccaagattctgcgtgctgagcgctttgtctccgctgctgatctgcaagagacgctcacgcgatacctctgggcgtgcaatcaccgcattccccaacgcgctttgggccacatgacccccatcgagagactccgaacgtggcaaatggagggaccagagttgttcagttcacaggtagataatgtcgcgggtcttgatagttagcaataaatacagtttcagaatatctgtaatacaaaaactgtatcgagacaagaaaaaagtagcaaaatttacaaatgttcatgattcatctggctaaattggatgttcaactgacccattgaagacaagggcaacaaccatggagaattttagatttaatgcatatacagagatgctttttggaaagggacaaatagagaagcttccagaggttttaaaaagatatggtaaaaatatattacttgcatatggtggtggaagtataaaaaagaatggactctatgatactatccaaaagctattgaaagattttaatattgttgaattaagtggtattgaaccaaatccaagaattgaaactgtaagacgtggagttgaactttgcagaaaaaataaagtagatgttattttagctgttggtggagggagtacaatagactgctcaaaggttataggggcaggttattattatgctggagatgcatgggaccttgtaaaaaatccagctaaaataggtgaggttttaccaatagtgacagttttaacaatggcagctactggttctgaaatgaatagaaatgctgttatttcaaagatggatacaaatgaaaagcttggaacaggatcacctaagatgatccctcaaacttctattttagatccagaatatttgtatacattgccagcaattcaaacagctgcaggttgtgctgatattatgtcacacatatttgaacaatattttaataaaactacagatgcttttgtacaagataaatttgcggaaggtttgttgcaaacttgtataaaatattgccctgttgctttaaaggaaccaaagaattatgaagctagagcaaatataatgtgggctagttcaatggctcttaacggacttttaggaagtgggaaagctggagcttggacttgtcatccaatagaacatgaattaagtgcattttatgatataactcatggagtaggtcttgcaattttaactccaagttggatgagatatatcttaagtgatgtaacagttgataagtttgttaacgtatggcatttagaacaaaaagaagataaatttgctcttgcaaatgaagcaatagatgcaacagaaaaattctttaaagcttgtggtattccaatgactttaactgaacttggaatagataaagcaaactttgaaaagatggcaaaagctgcagtagaacatggtgctttagaatatgcatatgtttcattaaatgccgaggatgtatataaaattttagaaatgtccctttaataaggctgagatcttcttcagtgcattgtagttgaatgaagggttaggggggaaatgcccccctattttttgtctagccatcctgccacgtttgacagggtagcaatttcgacacgatagggttctctcttctgccgtta

SEQ ID NO: 35 - DNA, 1967 bp, Artificial Sequence
  Synthetic Construct- Sequence No. 35, Example 35: designer oxyphotobacterial Butyraldehyde Dehydrogenase DNA construct (1967 bp)
agaaaatctggcaccacaccatccaaactcgccacccgcaaaccaatggcatggccgagcgctgcaacggtcgcattgccaagattctgcgtgctgagcgctttgtctccgctgctgatctgcaagagacgctcacgcgatacctctgggcgtgcaatcaccgcattccccaacgcgctttgggccacatgacccccatcgagagactccgaacgtggcaaatggagggaccagagttgttcagttcacaggtagataatgtcgcgggtcttgatagttagcaataaatacagtttcagaatatctgtaatacaaaaactgtatcgagacaagaaaaaagtagcaaaatttacaaatgttcatgattcatctggctaaattggatgttcaactgacccattgaagacaagggcaacaaccatgattaaagacacgctagtttctataacaaaagatttaaaattaaaaacaaatgttgaaaatgccaatctaaagaactacaaggatgattcttcatgtttcggagttttcgaaaatgttgaaaatgctataagcaatgccgtacacgcacaaaagatattatcccttcattatacaaaagaacaaagagaaaaaatcataactgagataagaaaggccgcattagaaaataaagagattctagctacaatgattcttgaagaaacacatatgggaagatatgaagataaaatattaaagcatgaattagtagctaaatacactcctgggacagaagatttaactactactgcttggtcaggagataacgggcttacagttgtagaaatgtctccatatggcgttataggtgcaataactccttctacgaatccaactgaaactgtaatatgtaatagtataggcatgatagctgctggaaatactgtggtatttaacggacatccaggcgctaaaaaatgtgttgcttttgctgtcgaaatgataaataaagctattatttcatgtggtggtcctgagaatttagtaacaactataaaaaatccaactatggactctctagatgcaattattaagcacccttcaataaaactactttgcggaactggagggccaggaatggtaaaaaccctcttaaattctggtaagaaagctataggtgctggtgctggaaatccaccagttattgtagatgatactgctgatatagaaaaggctggtaagagtatcattgaaggctgttcttttgataataatttaccttgtattgcagaaaaagaagtatttgtttttgagaacgttgcagatgatttaatatctaacatgctaaaaaataatgctgtaattataaatgaagatcaagtatcaaagttaatagatttagtattacaaaaaaataatgaaactcaagaatactctataaataagaaatgggtcggaaaagatgcaaaattattcttagatgaaatagatgttgagtctccttcaagtgttaaatgcataatctgcgaagtaagtgcaaggcatccatttgttatgacagaactcatgatgccaatattaccaattgtaagagttaaagatatagatgaagctattgaatatgcaaaaatagcagaacaaaatagaaaacatagtgcctatatttattcaaaaaatatagacaacctaaataggtttgaaagagaaatcgatactactatctttgtaaagaatgctaaatcttttgccggtgttggttatgaagcagaaggctttacaactttcactattgctggatccactggtgaaggaataacttctgcaagaaattttacaagacaaagaagatgtgtactcgccggttaataaggctgagatcttcttcagtgcattgtagttgaatgaagggttaggggggaaatgcccccctattttttgtctagccatcctgccacgtttgacagggtagcaatttcgacacgatagggttctctcttctgccgtta

SEQ ID NO: 36 - DNA, 1602 bp, Artificial Sequence
  Synthetic Construct- Sequence No. 36, Example 36: designer oxyphotobacterial Butyryl-CoA Dehydrogenase DNA construct (1602 bp)
agaaaatctggcaccacacctgatctgcaagagacgctcacgcgatacctctgggcgtgcaatcaccgcattccccaacgcgctttgggccacatgacccccatcgagagactccgaacgtggcaaatggagggaccagagttgttcagttcacaggtagataatgtcgcgggtcttgatagttagcaataaatacagtttcagaatatctgtaatacaaaaactgtatcgagacaagaaaaaagtagcaaaatttacaaatgttcatgattcatctggctaaattggatgttcaactgacccattgaagacaagggcaacaaccatgaatttccaattaactagagaacaacaattagtacaacaaatggttagagaattcgcagtaaatgaagttaagccaatagctgctgaaatcgacgaaacagaaagattccctatggaaaacgttgaaaaaatggctaagcttaaaatgatgggtatcccattttctaaagaatttggtggagcaggcggagatgttctttcatatataatagctgtggaagaattatcaaaagtttgtggtactacaggagttattctttcagcgcatacatcattatgtgcatcagtaattaatgaaaatggaactaacgaacaaagagcaaaatatttacctgatctttgcagcggtaaaaagatcggtgctttcggattaactgaaccaggtgctggtacagatgctgcaggacaacaaacaactgctgtattagaaggggatcattatgtattaaatggttcaaaaatcttcataacaaatggtggagttgctgaaactttcataatatttgctatgacagataagagtcaaggaacaaaaggaatttctgcattcatagtagaaaagtcattcccaggattctcaataggaaaattagaaaataagatggggatcagagcatcttcaactactgagttagttatggaaaactgcatagtaccaaaagaaaacctacttagcaaagaaggtaagggatttggtatagcaatgaaaactcttgatggaggaagaattggtatagctgctcaagctttaggtattgcagaaggagcttttgaagaagctgttaactatatgaaagaaagaaaacaatttggtaaaccattatcagcattccaaggattacaatggtatatagctgaaatggatgttaaaatccaagctgctaaatacttagtatacctagctgcaacaaagaagcaagctggtgagccttactcagtagatgctgcaagagctaaattatttgctgcagatgttgcaatggaagttacaactaaagcagttcaaatctttggtggatatggttacactaaagaatacccagtagaaagaatgatgagagatgctaaaatatgcgaaatctacgaaggaacttcagaagttcaaaagatggttatcgcaggaagcattttaagataaggctgagatcttcttcagtgcattgtagttgaatgaagggttaggggggaaatgcccccctattttttgtctagccatcctgccacgtttgacagggtagcaatttcgacacgatagggttctctcttctgccgtta

SEQ ID NO: 37 - DNA, 1248 bp, Artificial Sequence
  Synthetic Construct- Sequence No. 37, Example 37: designer oxyphotobacterial Crotonase DNA construct (1248 bp)
agaaaatctggcaccacacctgatctgcaagagacgctcacgcgatacctctgggcgtgcaatcaccgcattccccaacgcgctttgggccacatgacccccatcgagagactccgaacgtggcaaatggagggaccagagttgttcagttcacaggtagataatgtcgcgggtcttgatagttagcaataaatacagtttcagaatatctgtaatacaaaaactgtatcgagacaagaaaaaagtagcaaaatttacaaatgttcatgattcatctggctaaattggatgttcaactgacccattgaagacaagggcaacaaccatggaattaaaaaatgttattcttgaaaaagaagggcatttagctattgttacaatcaatagaccaaaggcattaaatgcattgaattcagaaacactaaaagatttaaatgttgttttagatgatttagaagcagacaacaatgtgtatgcagttatagttactggtgctggtgagaaatcttttgttgctggagcagatatttcagaaatgaaagatcttaatgaagaacaaggtaaagaatttggtattttaggaaataatgtcttcagaagattagaaaaattggataagccagttatcgcagctatatcaggatttgctcttggtggtggatgtgaacttgctatgtcatgtgacataagaatagcttcagttaaagctaaatttggtcaaccagaagcaggacttggaataactccaggatttggtggaactcaaagattagcaagaatagttggaccaggaaaagctaaagaattaatttatacttgtgaccttataaatgcagaagaagcttatagaataggcttagttaataaagtagttgaattagaaaaattgatggaagaagcaaaagcaatggctaacaagattgcagctaatgctccaaaagcagttgcatattgtaaagatgctatagacagaggaatgcaagttgatatagatgcagctatattaatagaagcagaagactttgggaagtgctttgcaacagaagatcaaacagaaggaatgactgcgttcttagaaagaagagcagaaaagaattttcaaaataaataaggctgagatcttcttcagtgcattgtagttgaatgaagggttaggggggaaatgcccccctattttttgtctagccatcctgccacgtttgacagggtagcaatttcgacacgatagggttctctcttctgccgtta

SEQ ID NO: 38 - DNA, 1311 bp, Artificial Sequence
  Synthetic Construct- Sequence No. 38, Example 38: designer oxyphotobacterial 3-Hydroxybutyryl-CoA Dehydrogenase DNA construct (1311 bp)
agaaaatctggcaccacacctgatctgcaagagacgctcacgcgatacctctgggcgtgcaatcaccgcattccccaacgcgctttgggccacatgacccccatcgagagactccgaacgtggcaaatggagggaccagagttgttcagttcacaggtagataatgtcgcgggtcttgatagttagcaataaatacagtttcagaatatctgtaatacaaaaactgtatcgagacaagaaaaaagtagcaaaatttacaaatgttcatgattcatctggctaaattggatgttcaactgacccattgaagacaagggcaacaaccatgaaaaagatttttgtacttggagcaggaactatgggtgctggtatcgttcaagcattcgctcaaaaaggttgtgaggtaattgtaagagacataaaggaagaatttgttgacagaggaatagctggaatcactaaaggattagaaaagcaagttgctaaaggaaaaatgtctgaagaagataaagaagctatactttcaagaatttcaggaacaactgatatgaagttagctgctgactgtgatttagtagttgaagctgcaatcgaaaacatgaaaattaagaaggaaatctttgctgagttagatggaatttgtaagccagaagcgattttagcttcaaacacttcatctttatcaattactgaagttgcttcagctacaaagagacctgataaagttatcggaatgcatttctttaatccagctccagtaatgaagcttgttgaaattattaaaggaatagctacttctcaagaaacttttgatgctgttaaggaattatcagttgctattggaaaagaaccagtagaagttgcagaagctccaggattcgttgtaaacggaatcttaatcccaatgattaacgaagcttcattcatccttcaagaaggaatagcttcagttgaagatattgatacagctatgaaatatggtgctaaccatccaatgggacctttagctttaggagatcttattggattagatgtttgcttagctatcatggatgttttattcactgaaacaggtgataacaagtacagagctagcagcatattaagaaaatatgttagagctggatggcttggaagaaaatcaggaaaaggattctatgattattctaaataaggctgagatcttcttcagtgcattgtagttgaatgaagggttaggggggaaatgcccccctattttttgtctagccatcctgccacgtttgacagggtagcaatttcgacacgatagggttctctcttctgccgtta

SEQ ID NO: 39 - DNA, 1665 bp, Artificial Sequence
  Synthetic Construct- Sequence No. 39, Example 39: designer oxyphotobacterial Thiolase DNA construct (1665 bp)
agaaaatctggcaccacacctgatctgcaagagacgctcacgcgatacctctgggcgtgcaatcaccgcattccccaacgcgctttgggccacatgacccccatcgagagactccgaacgtggcaaatggagggaccagagttgttcagttcacaggtagataatgtcgcgggtcttgatagttagcaataaatacagtttcagaatatctgtaatacaaaaactgtatcgagacaagaaaaaagtagcaaaatttacaaatgttcatgattcatctggctaaattggatgttcaactgacccattgaagacaagggcaacaaccatgggcaaagaaagtagttttagctgtgcatgtcgtacagccatcggaacaatgggtggatctcttagcacaattcctgcagtagatttaggtgctatcgttatcaaagaggctcttaaccgcgcaggtgttaaacctgaagatgttgatcacgtatacatgggatgcgttattcaggcaggacagggacagaacgttgctcgtcaggcttctatcaaggctggtcttcctgtagaagtacctgcagttacaactaacgttgtatgtggttcaggtcttaactgtgttaaccaggcagctcagatgatcatggctggagatgctgatatcgttgttgccggtggtatggaaaacatgtcacttgcaccatttgcacttcctaatggccgttacggatatcgtatgatgtggccaagccagagccagggtggtcttgtagacactatggttaaggatgctctttgggatgctttcaatgattatcatatgatccagacagcagacaacatctgcacagagtggggtcttacacgtgaagagctcgatgagtttgcagctaagagccagaacaaggcttgtgcagcaatcgaagctggcgcattcaaggatgagatcgttcctgtagagatcaagaagaagaaagagacagttatcttcgatacagatgaaggcccaagacagggtgttacacctgaatctctttcaaagcttcgtcctatcaacaaggatggattcgttacagctggtaacgcttcaggtatcaacgacggtgctgcagcactcgtagttatgtctgaagagaaggctaaggagctcggcgttaagcctatggctacattcgtagctggagcacttgctggtgttcgtcctgaagttatgggtatcggtcctgtagcagctactcagaaggctatgaagaaggctggtatcgagaacgtatctgagttcgatatcatcgaggctaacgaagcattcgcagctcagtctgtagcagttggtaaggatcttggaatcgacgtccacaagcagctcaatcctaacggtggtgctatcgctcttggacacccagttggagcttcaggtgctcgtatccttgttacacttcttcacgagatgcagaagaaagacgctaagaagggtcttgctacactttgcatcggtggcggtatgggatgcgctactatcgttgagaagtacgaataaggctgagatcttcttcagtgcattgtagttgaatgaagggttaggggggaaatgcccccctattttttgtctagccatcctgccacgtttgacagggtagcaatttcgacacgatagggttctctcttctgccgtta

SEQ ID NO: 40 - DNA, 4071 bp, Artificial Sequence
  Synthetic Construct- Sequence No. 40, Example 40: designer oxyphotobacterial Pyruvate-Ferredoxin Oxidoreductase DNA construct (4071 bp)
agaaaatctggcaccacacctgatctgcaagagacgctcacgcgatacctctgggcgtgcaatcaccgcattccccaacgcgctttgggccacatgacccccatcgagagactccgaacgtggcaaatggagggaccagagttgttcagttcacaggtagataatgtcgcgggtcttgatagttagcaataaatacagtttcagaatatctgtaatacaaaaactgtatcgagacaagaaaaaagtagcaaaatttacaaatgttcatgattcatctggctaaattggatgttcaactgacccattgaagacaagggcaacaaccatggcgcagaggtgcaaggagcccgtcgacggaacgacagccacgacgcacgtggcctacttcatgagcgacagcgcgttcatcttccccatcacgcccagctcggtcatgtccgaggtcgcccacgagtggtccatgaacggccgcaagaacgccttcggccagcccacgatggtccgccagatgcagagcgaggctgggtctgccggcgccctgcacggcgcgctcagcgagggagcgctggcgacgacgttcacgagcagccagggcctgctgctcatgatccccaacatgtacaagatcgccggcgagctcctgccctgcgtcatgcacatcgccgcccgcaccgtcgccaccgaggccctctctatcttcggcgaccacacggatgtctacgcggtgaggtcgacggggttcgcgttcctgtgctccgcgaccgtccaggagtgcatccacatgtccgccgccgcgcacgccgccaccctgtccagcgaggtcccgttcgcccacttcttcgacggcttccgcacgtcccacgagatccagaagatcgacttcccctcggacgccgacctgctggcctgcatgaactttgacgacgtccgcaggttccgtggccgctcgctgtgctgcgagcgcccgctgctgcgcgggacggcgcagaaccccgacgtcttcatgcaggcgtccgagtcgaacctggcgacgctggccagggtccccgcggccatcgacgaggcgctggctcgtgtgaacaaggtgttcgggaccaactacaggacctacgagtactatggccaccccgaggccacggacgtgatcgtggccatgggaagcggcaccgaagtggccatctcgactgccaacttcctcaactcgcgcgacgcgaactcgagggtcggcgtcgtgagggtgcggctgttccggccgtttgtgtcggcggcgtttgtggctgcgctgcccaagaccgtcaagaggatctgcgttctggaccgcgggagggacgggcaggcggccgcggaccccctgcaccaggacgtcctgtcggcgctgggtctggcagcgcccgggagggttcaggtgtgcgtgggaggcgtgtacggtctgtcgtccaaggacttcaaccccgaccacgtgatcgccgtgtacaggaacctcgcgtcggcgagccccaagaacaggttcagcgtcggcatcgtcgacgacgtgacgcacaacagcctggacatgggagagcacgtggacgcgctgccgcaggggacgaagcagtgcctgctgtggggcatcggcggagacgggaccatcggggcgaacaagacggccatcaagctgatcgcggaccacacggagctgcacgcgcaggggtactttgcgtacgacgccaacaaggccggcggcctgacagtctcgcacctgcggttcggcccgacgcggttcgaggcgccgtacctggtgaacgacagcaactacgtggcgtgccacaacttctcgtacgtgcacaggttcaacctgctgtcgtcgctgcgcaccgggggcacgttcgtgctcaactgcccgtgccggaccgtggaggagctggacacggcactcccggtgcgcctgaggcgcgagatcgccaggcggcaggccaagttctatgtgatcgacgcgaccaagatcgccaaggacaacgggatgggcccgttcatcaacatggtcctccaggccgtgttcttctatctgtcccacgtgctcgatgtgaacgaggcagtggcactcctgaagaagagcatccagaagatgtacgcgcgcaagggcgaggaggttgtcaggaagaacgtggcatcggtcgacgcgtcgctggatcccaaggcgttgctgcacatcgagtaccccgcagacaggtggcttgcgctggccgacgagcacgtgccccgcatgggtctgctcactgtccccgagcgcctgcagaagttcaacgccgagctgtacgagccgaccctcgcgtacgatggggagagcatcccggtcagcaggttccctcgcggcggcgagacgccgacgggcacgactcagctgggcaagcgtggcatcgccgagagcgtgccgcactggaaccacgagaagtgcgtgcagtgcaaccagtgctcgttcgtgtgcccgcacgccgtcatccggtcgtaccagatcagcgaggaggagatgaagaacgcccctgccggcttcgacactcttaagtcgcgcaagcccgggtatcgtttccgcatcaacgtcagcgccctggactgcactggctgcagcgtgtgcgtggagcagtgcccagtcaagtgcctggagatgaagcctctcgagtccgagttcgagatgcagaaggacgccatcaggttcgtccgcgagatggtcgcgcccaagcccgagctgggagaccgcaagactcccgtcggcatcgcgtctcacacgccgctgttcgagttcccgggagcctgcgccgggtgcggtgagaccccgctggtgcgcctcgtgacgcagatgttcggtgagcgcatggtcatcgccgcggccactgggtgcaactcgatctggggagcgtcgttcccgaacgtgccgtacacaaccaacgcccgcggggagggccccgcgtggcacaactcgctgttcgaggacgcggcggagctcgggtatggcattacgtgtgcgtatcgccagcgccgcgagcgcctcatcggcatcgtgcggagcgtcgtcgacgatgcgggatccgtgcagggtctgtctgctgagctgaaggctctgctggtcgagtggctcgcgcacgtcagggacttcgagaagacccgcgagctccgcgacaggatgaaccccctgatcgacgcaatcccagcgaacgcggactgcagggttctggagctcagggagaagcacaaccgcgagctgatcgcgcgcacgagtttctggatcctcggtggcgacgggtgggcgtacgacatcggcttcggtggactggaccacgtgatcgccaacaacgaggacgtcaacatccttgttctcgacacggaggtctactccaacactggtggccagcgctccaagtcgacgccgctcggcgcccgcgccaagtacgctgtgctgggcaaggacactgggaagaaggacctggggcgcatcgcgatgacctacgagaccgcgtacgtggccagcatcgcgcagggagccaaccagcagcagtgcatggacgcgctgagggaggccgaggcctaccagggcccctcgatcgtcattgcgtacactccgtgcatggagcaccagatggtccgcgggatgaaggagagccagaagaaccagaagctggctgtggagacgggctactggctgctgtaccgcttcaaccccgacctcatccacgagggcaagaaccccttcaccctcgactcgaagcctccctcgaagcctcccaaggagttcctggacacgcagggccgtttcattactctgcagcgcgagcaccccgagcaggcccacctccttcacgaggcactcacccgctctctggccacccgcttcgtgcgctaccagcgcctcgtgcagctgtacgagcccgctgcccctgccgcagctcctgccacgcattaaggctgagatcttcttcagtgcattgtagttgaatgaagggttaggggggaaatgcccccctattttttgtctagccatcctgccacgtttgacagggtagcaatttcgacacgatagggttctctcttctgccgtta

SEQ ID NO: 41 - DNA, 1806 bp, Artificial Sequence
  Synthetic Construct- Sequence No. 41, Example 41: designer oxyphotobacterial Pyruvate Kinase DNA construct (1806 bp)
agaaaatctggcaccacacctgatctgcaagagacgctcacgcgatacctctgggcgtgcaatcaccgcattccccaacgcgctttgggccacatgacccccatcgagagactccgaacgtggcaaatggagggaccagagttgttcagttcacaggtagataatgtcgcgggtcttgatagttagcaataaatacagtttcagaatatctgtaatacaaaaactgtatcgagacaagaaaaaagtagcaaaatttacaaatgttcatgattcatctggctaaattggatgttcaactgacccattgaagacaagggcaacaaccgtgttcactaaaattgtagctacattggggccttcgactgatagactgccggatataacggccctgttgagcaaggttcacggcgtgcggataaatatgtctcacgcatcgccatcggaggtagaggcccgcgtgaacgccgtgaggaagtatgaggagaccagcgggaggtatatagccattatagcggatctaaggggccccagcgtcaggaccggccttatgcgccctctacagataacggcgggcgcccgcgtctcctttaaattagccgagaagggggacggcttcgtacctgtgccgcggcgtgagttcttcgaagtaatcgaggagggagacgaggttcttatgttagacggaaaactcgtcttgaggataatcagcgcagcgcagacctcggccgaggccgagtcgttatcctccggcgtcatatccagcaataaggcaatagtggtcaaaggcaaggaatatcatatagagcagcctgtggaggaagacataagggcgcttcagacgctctctcggttcagagacgacgtagactacgtggccctcagccttgtgagagacggagcagacgtgaggaaaatgaggagcgtcgtcgaggaggctgggctcacctccggcataatggccaaaatagagacgaagagcgcagtagataaaatcgaggagataatcaatgcggccgactacatagttatagcgagaggcgatctggcgctgcactacggactggagtacattcctaaagtacagaggctcttggtggagagatctctctcggcaggaaggcccgtggcggtggccacgcagcttttggactctatgcagaccaacacgacgcccactagggcggaggtcaacgacgtgtacacaacggcgagtctcggagtggactctctgtggctgaccaacgagactgcgagcggagagcacccgttagaggcagtggattggctgaggaggatagtgtcgcaggtcgagttcgggagacttaaggctgcgtcgccggccgacgcacgcgataggttcgccaaagccgtggtagatatggccgaggacatgggaggggaaatcgcagtatactcaatgacgggaactctggcgaagagaatagctaaatttaggccgatgacgacagtctacgtcggagtcaacgagaggaggctcgcgaggatgttggagctccgcgaggatgttggagctcatatggggcctagagcctgtggtcgtgccggcgcatacttacgaggagggcctcgagaggctcctctccagattctccgacaaagtcttgatagccacgtatgggctcagaggcggcacacatactattaataaggctgagatcttcttcagtgcattgtagttgaatgaagggttaggggggaaatgcccccctattttttgtctagccatcctgccacgtttgacagggtagcaatttcgacacgatagggttctctcttctgccgtta

SEQ ID NO: 42 - DNA, 1696 bp, Artificial Sequence
  Synthetic Construct- Sequence No. 42, Example 42: designer oxyphotobacterial Enolase DNA construct (1696 bp)
agaaaatctggcaccacacctgacccccatcgagagactccgaacgtggcaaatggagggaccagagttgttcagttcacaggtagataatgtcgcgggtcttgatagttagcaataaatacagtttcagaatatctgtaatacaaaaactgtatcgagacaagaaaaaagtagcaaaatttacaaatgttcatgattcatctggctaaattggatgttcaactgacccattgaagacaagggcaacaaccttattttttcttcaagttaaagaatgcgttcattccaggataaacggcaatgctgccaagctcttcttcaattctcaagagctgattgtattttgctactctgtctgttcttgacggtgcacctgtctttatctgaccagcatttactgcaacaacaaggtcagcaattgttgtatcttcagtctcacctgatctgtgggatacaactgcagtgtagcctgctctatttgccatttcaatagcttctaaagtttctgtaagtgttcctatctgattaagcttaatcaatattgagtttgcaacgccaagttctattccctttgcaagcctctttgtgtttgtaacaaacaaatcatcacccacaagctgaatcttcttgccaagtgcttcagttagcatcttccagccttcccagtcctcttctgcaacaccgtcttcaattgatacaattgggtacttttcaacaagttttacccagaattctaccatttcttcttttgttctaactttaccttctctttcgaaatgatactttccatcttcttcattgtagagctcagatgttgcagggtcaagcgcaattgcaatatccttaccaggagtataaccagctttttcaattgcttcgacaattacttccaatggctcttcgttagacttcaagtttggtgcaaatccaccttcatcacccactgttgtgttgtatcctcttgccttcaatacatttcttaattgatggaatgtctcagcacacatcctgagtgcttcgctaaaagattttgcaccaactggcattatcataaactcttgtaggtcaacagagttgtcagcatgctttccaccgttcaaaatattcatcattggcacaggtaaatactttgcattgacaccaccaatgtattggtacagtggaagaccaagtgcgtttgccgctgccttcgcaactgccaaagatacacccaaaattgcatttgcaccaagcttgctcttgttctctgtcccatcaagctcaatcataagcctgtcaatctcaacttggttaagagcgttcattccaattatttctggcgcaataacctcgtttacattttcgactgctttgagaaccccttttcccatatatctttttttatcaccgtctctgagttcaacagcctcgaacatacctgttgacgcacctgatggaacagcagctctacctacaaattcatcatttacaacaacttctacttcaacagttgggtttcctcttgaatccagaatttctcttgcttttacagctgtaattgaaagatcaaccttcattaaggctgagatcttcttcagtgcattgtagttgaatgaagggttaggggggaaatgcccccctattttttgtctagccatcctgccacgtttgacagggtagcaatttcgacacgatagggttctctcttctgccgtta

SEQ ID NO: 43 - DNA, 2029 bp, Artificial Sequence
  Synthetic Construct- Sequence No. 43, Example 43: designer oxyphotobacterial Phosphoglycerate-Mutase DNA construct (2029 bp)
agaaaatctggcaccacacctgacccccatcgagagactccgaacgtggcaaatggagggaccagagttgttcagttcacaggtagataatgtcgcgggtcttgatagttagcaataaatacagtttcagaatatctgtaatacaaaaactgtatcgagacaagaaaaaagtagcaaaatttacaaatgttcatgattcatctggctaaattggatgttcaactgacccattgaagacaagggcaacaaccctacgccggcgcctgcttctcctcctgccggcagcacttctccaaagggtgcacgttcgcttctcttgtaatcagggtctggccggtcatctcggccggtttcgggatgcccagcaggtgcaggatggtgggggccacatcccgcaggctgccgtcccgcagcgcaatgccggcggtatcccgcccgatcaggatgaacggcaccgggctggtggtgtgggccgtatgaggctgtccctcttcgtccaccatctcatccgcattgccgtggtctgccgttatcaggagcgtgccgtccttttccaggacggcccgcgccacctttccaaggcagcggtcgattgtttctatggcctttaccgttgccttcatgtcgccggtatgcccgaccatgtcgggattggcgtaattcattatgattacgtcgtacttgcccgaggccagccgctccagaaaggtgccggtgacctcgttggcgctcatttcgggcttcaggtcgtaggtggccacccgcggggagggcaccaggatcctgtcttcgccggggtatggcttttctaagccgccgttgaagaagaaggtcacatgggcgtacttttccgtttcggccaggcggagctgggtcatgccgtgcctgcttaaaacctcgcccagggtattgcgcagctcctgcggctgaaacgccaccggcgccttaatggtcttgtcgtaaagggtcatgcaggtaaaatgcacggcagggtagccctgctttctggcaaacccggtgaaatcctcgtccacaaaggccctggtaatctggcgggcccggtccggccggaagttaaagaaaataacggcgtcgcccttcattattttggcggccggcccacccgacccgtttaccacgacggtgggctggataaactcgtcggtttcatcccttccgtaccccaggtcaaccgcctccagcgggcttgttgcctgaatgccctcgcctaaaaccattgcgttgtacgcccgctcggtgcggtcccagcggcggtctctgtccatggcgtaatagcgccccattaccgttgccaccgccccaaagcccagttcgcccagcttcttccttaactgctcgaagtattcttttgcgttggccggcggcacgtcgcgcccgtccaggaaggcatggacaaagacgttgcgcatgttctcgcgggcggccaggtccaggagggcgaaaaggtggctgatatggctgtgcactccgccgtccgataaaagccccatcaggtgaagggccttattattctccctggcgtatctcaccgcctccagcaggacttcgttcttgaaaaaggtcccgtccttgatggcgcggcttattctggtaagctcctggtacaccaccctgccggcgcctatgttcaagtgtcccacctcggaattgcccatctggccctcgggaagccccacgtcctcgccggaacagctcagggcacagtgggggtaaccggccagaaagctcttgaaattcggtgtgctggccagggctatggcattgccccggacattggaactgaggccccagccgtccagaaccaccagcaccaggggcctgccgccggcataccggccgcagggcgttgcagctacgtcttccttcaataaggctgagatcttcttcagtgcattgtagttgaatgaagggttaggggggaaatgcccccctattttttgtctagccatcctgccacgtttgacagggtagcaatttcgacacgatagggttctctcttctgccgtta

SEQ ID NO: 44 - DNA, 1687 bp, Artificial Sequence
  Synthetic Construct- Sequence No. 44, Example 44: designer oxyphotobacterial Phosphoglycerate Kinase DNA construct (1687 bp)
agaaaatctggcaccacacctgacccccatcgagagactccgaacgtggcaaatggagggaccagagttgttcagttcacaggtagataatgtcgcgggtcttgatagttagcaataaatacagtttcagaatatctgtaatacaaaaactgtatcgagacaagaaaaaagtagcaaaatttacaaatgttcatgattcatctggctaaattggatgttcaactgacccattgaagacaagggcaacaaccttatttatcgagcagcgcccttactcccggcagttgcttcccttccagaaactccagggaagcgccgccgccggttgagatatgggtcattttgccggctacgccggccttcttggccgccgccgccgtgtcaccgccgccgattacggtgacggcgtttaattcggccagcgtccgggctattgcttcggtgcccctggcaaaaggatccatttcaaaaacgcccattggtccgttccagaccacggtcctggccgccctgagggcttcggtgaaaagtctgatggactcgggccctatatccagggccatccactccgccgggatttgatcgaccggcaccgtcctttgctcctggccgggcgccggccccggcgccaccaccacatccaccggcaggaggagctttacttccctgcttctggcttctgcaatcagcttcctggccaggtcaatcttgtcggcctccagcagggacttaccgacgctgtacccttgtgccttcagaaaggtattggccatcccgccgccaatgataaccgtatcgactttggtcagcaggttgaaaattactcccagcttgtcggaaactttcgagccgcccacgacggctgcaaaagggcgctccgggctggtcagcagcctgcccagtatttccagctctttttccatcagcaggcctgccacggccggcaaaaacccggcaacgccctcggtggaggcgtgggcccggtgtgcggttccaaacgcatcgtttacaaagacatctgccagctcagccagttgccgggcaaacttctcgtcgtttttctcctcctccgggtggaaacggacgttttccagcagcaccacgtccccgtcctgcatctgggcaacggcggacctggcggcttctcccacgcagtcgccggccttaaccaccgttttccccagcagttcggaaaggcgcctggcaacgggatccattttgtacctctcgtccaccctgcccttgggccggcccaggtgcgaaaccagaataaccctggctttttgtccgataaggtagtttatggtgggcacggcctcctttattttaacgtcatcggccacccggccgttttccatcggcacgttgaagtccacccgcaacaggacccgcttgccctttacatctatatcccttaccgtttttttggccactaaggctgagatcttcttcagtgcattgtagttgaatgaagggttaggggggaaatgcccccctattttttgtctagccatcctgccacgtttgacagggtagcaatttcgacacgatagcgtgctgtactgttttttgctcgtcagggttgggttttgtcatcgacacccaaggattggagtcggtgctcaataatcgccagttgctgttgggcagccgccaattgcgcctgaggttctctcttctgccgtta

SEQ ID NO: 45 - DNA, 1514 bp, Artificial Sequence
  Synthetic Construct- Sequence No. 45, Example: designer oxyphotobacterial Glyceraldehyde-3-Phosphate Dehydrogenase DNA construct (1514 bp)
agaaaatctggcaccacacctgatctgcaagagacgctcacgcgatacctctgggcgtgcaatcaccgcattccccaacgcgctttgggccacatgacccccatcgagagactccgaacgtggcaaatggagggaccagagttgttcagttcacaggtagataatgtcgcgggtcttgatagttagcaataaatacagtttcagaatatctgtaatacaaaaactgtatcgagacaagaaaaaagtagcaaaatttacaaatgttcatgattcatctggctaaattggatgttcaactgacccattgaagacaagggcaacaaccaatggatttgggcggatcggacgtttagcattcagaagaattcaagatgtagaaggtcttgaagtagttgcagttaacgacttaacagatgacgatatgttagctcatttattaaaatacgatactatgcaaggtcgtttcactggagaagttgaagttatcgaaggtggattccgtgttaacgtaaaagaaattaaatcattcgatgaccagatgctgggtaaattaccatggggcgatttagatatcgacgtagtattagaatgtactggtttctatactgataaagaaaaagcacaagctcacatcgatgcaggtgctaaaaaagtattaatctcagctccagctaaaggtgatgtaaaaacaatcgtattcaacactaaccatgacgcattagacggttcagaaacagttgtttcaggtgcttcttgtactactaactcattagcaccagttgcaaaagttttaagtgatgaattcggtttagttgaaggtttcatgactacaattcacgcttacactggtgaccaaaatacacaagacgcacctcacagaaaaggtgacaaacgtcgtgcacgtgcagcagcagaaaatattatccctaactcaacaggtgctgctaaagctatcggtaaagttattccagaaatcgatggtaaattagacggtggagcacaacgtgttccagttgctactgggtctttaactgaattaactgtagtattagacaaacaagatgtaactgttgaccaagttaacagtgctatgaaacaagcttcagacgaatcattcggttacactgaagacgaaatcgtatcttctgatatcgttggtatgacttacggttcattattcgatgcgactcaaactcgtgttatgactgttggagatcgtcaattagttaaagttgcagcttggtacgacaaagagtggggtaaggctgagatcttcttcagtgcattgtagttgaatgaagggttaggggggaaatgcccccctattttttgtctagccatcctgccacgtttgacagggtagcaatttcgacacgatagcgtgctgtactgttttttgctcgtcagggttgggttttgtcatcgacacccaaggattggagtcggtgctcaataatcgccagttgctgttgggcagccgccaattgcgcctgaggttctctcttctgccgtta

SEQ ID NO: 46 - DNA, 609 bp, Artificial Sequence
  Synthetic Construct- Sequence No. 46, Example 46: designer Nial-promoter-controlled Proton-Channel DNA construct (609 bp)
agaaaatctggcaccacacctatatggtagggtgcgagtgaccccgcgcgacttggagctcgatggccccgggttgtttggggcgtccgcctctcgcgctattctgagctggagaccgaggcgcatgaaaatgcattcgcttccataggacgctgcattgtggcttgaaggttcaagggaagggttcaaacgaccccgccgtacgaacttttgtcggggggcgctcccggccccgggctcttgtgcgcgcattagggcttcgggtcgcaagcaagacgatacatggccggcatcggcgccgtgctgaaggtcctgaccaccggcctgcccgccctgatcagctggatcaagcgcaagcgccagcagtaaatggaggcgctcgttgatctgagccttgccccctgacgaacggcggtggatggaagatactgctctcaagtgctgaagcggtagcttagctccccgtttcgtgctgatcagtctttttcaacacgtaaaaagcggaggagttttgcaattttgttggttgtaacgatcctccgttgattttggcctctttctccatgggcgggctgggcgtatttgaagcggttctctcttctgccgtta

SEQ ID NO: 47 - DNA, 1360 bp, Artificial Sequence
  Synthetic Construct- Sequence No. 47, Example 47: designer nirA-promoter-controlled NAD-dependent Glyceraldehyde-3-Phosphate-Dehydrogenase DNA construct (1360 bp)
agaaaatctggcaccacacccttcttgcagaacatgcatgatttacaaaaagttgtagtttctgttaccaattgcgaatcgagaactgcctaatctgccgagtatatgaacggatttggcaggataggacgactggtgttgcgggcggcggtggagaagggcacggtggaggtggtggcggtgaacgatccgttcatcttcccggacgcggcgtacgctgcgtacatgctgcagtacgactcgacgcacggggcgttcccgggtgaggtgggcagcgacggggagcacttggtggtgaacgggaagaagctggcgtgctttgcgatccgcgatccggcggagatcccgtggggctcggtcggcgccgactacgtcgtggagtccaccggcgtgttcaccgtgaccgagaaggcgtcgttgcacgtcaagggcggcgcgaagaaggtggttatatcggcgccgtcgaaggatgcgcccatgtttgtgatgggcgtgaaccatgacgcctacaccaaggacttgacggtggtgtcgaatgcgtcttgcaccaccaacttgtttggcgccgctggccaagatcatcgacgaggcgttcggcatcgggatgggcctcatgagcaccatccacgcggtgacggccacgcaaaagacggtggatgggccgagctccaaagactggcgcggtgtcgcggcgcgttccagtcgattattcccagcagcaccggcgctgcgaaagcggtcggcaaggtgtacccgaagctgaacggcaagctgaccggcatggcgttccgcgtgccggtgcccgacgtgtccgtggtagacttgacagtgaccctgaagaaggagaccaactacgaggagatcaaaaaggctgtcaagcaggcgtcgcagagcccgcactacaagggcatcgtggcgtacaccgagcaccccatcgtgtcggccgacctggtgcacaacccgtactcgtcggtgttcgatgccgaagccggtatcatgctgtcgcccacgtttgtgaaactggtcagctggtaatagtgatcccggccgctactaaagcctgatttgtcttgatagctgctcctgcctttgggcaggggcttttttctgtctgccattcttgaggatggcggactctttcccttttgctctacgcccatgaatgcgatcgcagtctcccctgtccagcacgttggagtgattggtggtggccagttagcttggatgctggcaccagcagcgcaacagttggggatgtcgctgcacgttcaaacacccaatgatcacgacccagcagtagcgatcgcggatcaaaccgtattagcagcagttgctgacgcggttctctcttctgccgtta

SEQ ID NO: 48 - DNA, 1621 bp, Artificial Sequence
  Syntheitc Construct- Sequence No. 48, Example 48: designer nirA-promoter-controlled Phosphoglycerate-Kinase DNA construct (1621 bp)
agaaaatctggcaccacacccttcttgcagaacatgcatgatttacaaaaagttgtagtttctgttaccaattgcgaatcgagaactgcctaatctgccgagtatatgtcatttgtcttcgagcgcgacgacacccggcagctgttttccttccataaactcgagcgaagcgccgccgccggtggagatatgatccattttgtcggccaagccgaatttctcaaccgccgccgccgaatccccgccgccgatgaccgaataggtgtcgggcgcttccgccagtgcttcggcgatcgcttttgtcccatgggcgaacgcttccatttcaaagacgcccatcgggccgttccagacaacgagcttcgattgacgaatgacatcgcggtacaattcgcgcgttttcgggccgatgtcaagcgcctcccaatcgctcggaatggcgtcgatggcgacgactttcgtgttggcgtcgttcgcaaaccggtcggcgacgaccacgtccaccggcatataaaaacggacgcctttttctttcgccttttccataaacgatttggcgagttcgattttgtcctcctcaagcagcgacttgccgacgtcatggccgagcgctttgacgaacgtatacgccagtccgccgccgatgatcaagttgtcgactttttcaagcaaattgtcgatgacgccgattttgtctttcactttcgcgccgccgatgatcgccgtaaacgggcggtccggattcgagagcgctttgccgagcacttcgagttctttttccatcaaaaacccggccaccgcaggcaagtaatgggcgatgccttccgtcgacgcatgagcgcggtgggcggcgccgaacgcatcgttgacatacagatccgcgagctccgcaaacgctttggccagctctggatcgtttttctcttcgccagggtaaaaacggacgttctcaagcaagagcacgtcgccttcgttcaaacggtcgaccgccgctttcacctcatcgccgaccgcttcattcgttttggcgaccggccgttcaagcagctcgccgagccgcttcgcaacggcatccaaacgcaattcttcgaccacttttcctttcgggcggccgaggtggctcgccaaaatgactttcgccccgtgctcgatcaaatagcggatcgtcgggagtgcggcgcgaatgcgcgtgtcatcggtgatggcgccttgctccatcggaacgttgaaatcgacgcggcaaaagacgcgctttcccctcacctcaacgtcgcggatcgtcttcttgttcattaatagtgatcccggccgctactaaagcctgatttgtcttgatagctgctcctgcctttgggcaggggcttttttctgtctgccattcttgaggatggcggactctttcccttttgctctacgcccatgaatgcgatcgcagtctcccctgtccagcacgttggagtgattggtggtggccagttagcttggatgctggcaccagcagcgcaacagttggggatgtcgctgcacgttcaaacacccaatgatcacgacccagcagtagcgatcgcggatcaaaccgtattagcagcagttgctgacgcggttctctcttctgccgtta

SEQ ID NO: 49 - DNA, 1990 bp, Artificial Sequence
  Synthetic Construct- Sequence No. 49, Example 49: designer nirA-promoter-controlled Phosphoglycerate-Mutase DNA construct (1990 bp)
agaaaatctggcaccacacccttcttgcagaacatgcatgatttacaaaaagttgtagtttctgttaccaattgcgaatcgagaactgcctaatctgccgagtatatgctcgagcatttatttaataataagcgagcttcccttcatctctgaaggtttttctaaccctaagatgtctaagattgttggagcaatgtctgctaagattccatcatctcttaatttaacattgccatatcccacaagatacaaaggcaccttatttgttgtatgagctgtatgaggctcacctgtctcataatcaatcatctgttcacagttgccatggtcagcagtaataataaccactccacccttttctaaaaccttgttaacaacttttccaatacactcatctacagcctcaactgcctttattgcagcctctaaaacgcctgtgtgccctaccatgtcaccatttgcatagttacatattatcacatcatattcatctctttcaattctctcaagtaaagcttctgttacctcgtatgcactcatctcaggtttaagatcatatgttgcaacctttggtgatggtaccaataccctgtcttctccgacatttggtacttccacaccgccgttgaagaaaaaggtgacatgagcatacttttctgtctcagcaattcgaagttgttttaaccctaacttgctaaaatactctcccaaagtgtttgtcaggttctctggtttgaatgcaacatggcaattttttattgtcacatcatactgagtcatgcatacaaagaacacttcgaaatatccttttttcctttcaaaaccgtcaaattcaacatcacaaaacgctcttgtaagctgtcttgctctgtcaggtctgaagttaaagaaaataatactgtcatgttcatttattgttgcgacaggttttccattttcaagcacaacagtcggaattacaaactcatcagtgttaccttttttatacgacttttcaaccgcctctaatcctgagcttgcatactcgccttcaccaaagaccattgcattatatgccttttcaactctttcccatcttttgtctctgtccattgcatagtatctgcccatcactgttgcaatcttaccacaaccaatttcttttatcttctgttcaagctcttcaatgtaaatttttgcgctcgaaggtggaacatctcgcccatccaaaaagcaatgaacatatactttttcaagattgtgcctctttgcaagttttaaaagtgcgtaaagatgtgtgttgtggctgtgaacaccaccatctgataaaagtcccatcagatgaagagaagagttatattttttgcaattctctattgccatcaaaaactcttctttttcaaaaaaatcaccgtctttaattgactttgttattcttgtaaattcttggtaaacaattcttcctgcacccaggttcagatgtccaacttcagaattccccatttgtccttcgggaagaccaacatccataccactgctaccaatcagggtatatgggtaattcttttcgtaatagtcaaggttaggggtcttacccaaagcaacagcgtttccctcttgctttgggttataaccccaaccgtccatgataatcaacacaacaggttttttcattaatctagataatagtgatcccggccgctactaaagcctgatttgtcttgatagctgctcctgcctttgggcaggggcttttttctgtctgccattcttgaggatggcggactctttcccttttgctctacgcccatgaatgcgatcgcagtctcccctgtccagcacgttggagtgattggtggtggccagttagcttggatgctggcaccagcagcgcaacagttggggatgtcgctgcacgttcaaacacccaatgatcacgacccagcagtagcgatcgcggatcaaaccgtattagcagcagttgctgacgcggttctctcttctgccgtta

SEQ ID NO: 50 - DNA, 1765 bp, Artificial Sequence
  Synthetic Construct- Sequence No. 50, Example 50: designer nirA-promoter-controlled Enolase DNA construct (1765 bp)
agaaaatctggcaccacacccttcttgcagaacatgcatgatttacaaaaagttgtagtttctgttaccaattgcgaatcgagaactgcctaatctgccgagtatatgctcgagcatatgctaaataaacccgtcgtttccattgaagaaattaccgctagagaaattttagactctcgtggccgtcctaccattgaagcagaagtcttactggaaacaggggctttcggtattgcccaggttcccagtggcgcgtcaactggtagcttcgaggcccacgaattacgggatgatgaccccaaccgctacggtggtaaaggcgttctcaaagcggttagtaacgttatagacgaaattgcccctaaaattatcggaatggatgggttagatcaaactgcgatcgatcacaccatgattgagttagacggttctactaataaaaaagaattaggggccaatgctatccttgccgtttccttagccactgcaaaagctgccgccgatgaattagcccttcccctgtaccgttatttagggggtcccttggccaatgtcttacccgtccccatgatgaacgtgattaacgggggttctcacgcggataataacgtagacttccaggagtttatgattatgccagtgggtgcggactcttttaaagaagctttgaggtggggggccgaagtgtttgcttccctcagtaaagttctaaaagagcgtaaattgctctctggggtaggagacgaggggggatacgccccgaacctgggatcgaaccaggaagccttagatttgctcatagaagccattgaaaaggcggggtataagccaggggaacaggtggctttagcgatggatgtggcttcaagtgagttttataaggatggcgaatatatttatgatggttctccccattcccctcaagaatttatcgattatttaggtaaattagtggatcaatatcctattatttccattgaagatggcttacaagaagatgactgggatagctggaaaagtttgaccgatacgttaggatctcgcattcagttagttggggacgatctttttgtcacgaaccccactcgtctgcaaaaaggcattgatatgggtgtgggtaatagtattctcattaaactcaatcaaattggtagtttaacggaaacgttagatacgattgctttagcgactcgtcatcaatatagttccgttatttcccatcgttccggagaaaccgaagacactaccattgcagacttagccgtagctacacgcgctggacaaatcaaaaccggttctctgtgtcgtagtgaacgggtagccaaatataaccgactattacgtattgaagaagaattaggcgatcgcgcagtttatgctgcaaaagtgggtttaggccctcaataaggctgctgccccggctgctgctaatctagataatagtgatcccggccgctactaaagcctgatttgtcttgatagctgctcctgcctttgggcaggggcttttttctgtctgccattcttgaggatggcggactctttcccttttgctctacgcccatgaatgcgatcgcagtctcccctgtccagcacgttggagtgattggtggtggccagttagcttggatgctggcaccagcagcgcaacagttggggatgtcgctgcacgttcaaacacccaatgatcacgacccagcagtagcgatcgcggatcaaaccgtattagcagcagttgctgacgcggttctctcttctgccgtta

SEQ ID NO: 51 - DNA, 1888 bp, Artificial Sequence
  Synthetic Construct- Sequence No. 51, Example 51: designer nirA-promoter-controlled Pyruvate-Kinase DNA construct (1888 bp)
agaaaatctggcaccacacccttcttgcagaacatgcatgatttacaaaaagttgtagtttctgttaccaattgcgaatcgagaactgcctaatctgccgagtatatgctcgagcatatgttaaaaaagacgaaaatcgtttgcacgcagggtccgtccacagagaaaccgggcgtaattgatgcactgattgccaatggcatgaactgcgcacgcttcaatttctcccatggtgaccacgaagaacatcttggccgtatcaatatggttcgtgaagctgccaagaaggctggcaaggttatctctttaatcctcgataccaaaggtccggaaatgcgtctgggcgagttcaaagatggcaaagttatgctcgaaaagggcaacaagttcactttgacctatgacgatgaaccgggtgatgaaactcatgtttccgtaaaccacaaaggtctttacacggaagttaagccgggcgacaccctgctcctctccgatggcctcgtagctctcaaagttgatgaaatcaagggcaaggatatcgttacgacgattcagaacagcggtaagatgagcacgcgcaagcgcgtagctgctccgggcgtaccccttggtctgcctcctatctccgaacaggatgctaaggacatcatctttggctgcgaacaggatatggatttcgtagctgcttccttcatccagcgtccggatgatgttatcgccatccgcaagctcatcgaagagcacaatggccacatggaaattctgccgaagatcgaaaacctcgaaggtgttaagaacttcgatgcaatcctggaagtttccgacggcatcatggttgcccgtggtgacctgggcgtagaagttccggcagaagatgtgccccttattcagaaggaaatcatccgcaagtgcaacgctgctggcaagccggttatcgttgctacgcagatgctcgactccatggaacgcaacccgcgtccgacccgtgcagaagtttctgacgttggtaacgccatcctcgatggtacggatgccatcatgctgtccggcgaaacggcttccggtgactatccggtagaagcagttgccacgatgaaccgcattgcacagcgcatggaaagctcccttgaatacaaggaactctatgtagaacgtggtctgcagcacatggaatcccgtacgcgtgctatcgctcatgctacggttcagatggcttatgagctcgatgctccggctattatcacgccgaccgaatccggttacacgacgaaggtcgtttccaagtatcgtccgaaggctgctatcgtagcttacacgccgagcgaaaaagttctgcgtcagctgaacctgcgttggggcgtatatccggtactcggcacccagtggagcgatgtggatgaaatgatcagcaatgcaacggctgctgctgttaaggaagacctcgtacagcgcggcgacctcaccatcatcacctccggtgtgaagatggaatcccgtacgcgtgctatcgctcatgctacggacatctaaggctgctgccccggctgctgctaatctagataatagtgatcccggccgctactaaagcctgatttgtcttgatagctgctcctgcctttgggcaggggcttttttctgtctgccattcttgaggatggcggactctttcccttttgctctacgcccatgaatgcgatcgcagtctcccctgtccagcacgttggagtgattggtggtggccagttagcttggatgctggcaccagcagcgcaacagttggggatgtcgctgcacgttcaaacacccaatgatcacgacccagcagtagcgatcgcggatcaaaccgtattagcagcagttgctgacgcggttctctcttctgccgtta

SEQ ID NO: 52 - DNA, 2188 bp, Artificial Sequence
  Synthetic Construct- Sequence No. 52, Example 52: designer nirA-promoter-controlled Pyruvate-Decarboxylase DNA construct (2188 bp)
agaaaatctggcaccacacccttcttgcagaacatgcatgatttacaaaaagttgtagtttctgttaccaattgcgaatcgagaactgcctaatctgccgagtatatgctcgagcatatggtatcaacctacccagaatcagaggttactctaggaaggtacctctttgagcgactccaccaattgaaagtggacaccattttcggcttgccgggtgacttcaacctttccttattggacaaagtgtatgaagttccggatatgaggtgggctggaaatgccaacgaattgaatgctgcctatgctgccgatggttactccagaataaagggattgtcttgcttggtcacaacttttggtgttggtgaattgtctgctttaaacggagttggtggtgcctatgctgaacacgtaggacttctacatgtcgttggagttccatccatatcgtcacaggctaaacagttgttgctccaccataccttgggtaatggtgacttcactgtttttcacagaatgtccaatagcatttctcaaactacagcatttctctcagatatctctattgcaccaggtcaaatagatagatgcatcagagaagcatatgttcatcagagaccagtttatgttggtttaccggcaaatatggttgatctcaaggttccttctagtctcttagaaactccaattgatttgaaattgaaacaaaatgatcctgaagctcaggaagaagttgttgaaacagtcctgaagttggtgtcccaagctacaaaccccattatcttggtagacgcttgtgccctcagacacaattgcaaagaggaagtcaaacaattggttgatgccactaattttcaagtctttacaactccaatgggtaaatctggtatctccgaatctcatccaagatttggcggtgtctatgtcgggacaatgtcgagtcctcaagtcaaaaaagccgttgaaaatgccgatcttatactatctgttggttcgttgttatcggacttcaatacaggttcattttcatactcctacaagacgaagaatgttgttgaattccactctgactatatgaaaatcagacaggccaccttcccaggagttcaaatgaaagaagccttgcaacagttgataaaaagggtctcttcttacatcaatccaagctacattcctactcgagttcctaaaaggaaacagccattgaaagctccatcagaagctcctttgacccaagaatatttgtggtctaaagtatccggctggtttagagagggtgatattatcgtaaccgaaactggtacatctgctttcggaattattcaatcccattttcccagcaacactatcggtatatcccaagtcttgtggggctcaattggtttcacagtaggtgcaacagttggtgctgccatggcagcccaggaaatcgaccctagcaggagagtaattttgttcgtcggtgatggttcattgcagttgacggttcaggaaatctctacgttgtgtaaatgggattgtaacaatacttatctttacgtgttgaacaatgatggttacactatagaaaggttgatccacggcaaaagtgccagctacaacgatatacagccttggaaccatttatccttgcttcgcttattcaatgctaagaaataccaaaatgtcagagtatcgactgctggagaattggactctttgttctctgataagaaatttgcttctccagataggataagaatgattgaggtgatgttatcgagattggatgcaccagcaaatcttgttgctcaagcaaagttgtctgaacgggtaaaccttgaaaattgaggctgctgccccggctgctgctaatctagataatagtgatcccggccgctactaaagcctgatttgtcttgatagctgctcctgcctttgggcaggggcttttttctgtctgccattcttgaggatggcggactctttcccttttgctctacgcccatgaatgcgatcgcagtctcccctgtccagcacgttggagtgattggtggtggccagttagcttggatgctggcaccagcagcgcaacagttggggatgtcgctgcacgttcaaacacccaatgatcacgacccagcagtagcgatcgcggatcaaaccgtattagcagcagttgctgacgcggttctctcttctgccgtta

SEQ ID NO: 53 - DNA, 1510 bp, Artificial Sequence
  Synthetic Construct- Sequence No. 53, Example 53: designer nirA-promoter-controlled NAD(P)H-dependent Alcohol-Dehydrogenase DNA construct (1510 bp)
agaaaatctggcaccacacccttcttgcagaacatgcatgatttacaaaaagttgtagtttctgttaccaattgcgaatcgagaactgcctaatctgccgagtatatgttagctacctctgtgccagaaacccaaaagggtgttattttctatgagaatggtggtaaattggaatacaaggacattccagttccaaagccaaagccaaatgaaatcttgatcaacgtcaagtactccggtgtgtgtcataccgatttgcacgcatggaagggtgactggccattgccaaccaagttgccattggtcggtggtcacgaaggtgctggtgtcgttgttgctatgggtgaaaacgtcaagggctggaacattggtgactttgcgggtatcaaatggttgaacggttcttgtatgtcctgtgaatactgtgaattgtccaatgaatccaactgtccagatgctgacttgtctggttacacccacgatggttctttccaacaataccgtaccgcagatgctgttcaagctgccagaattccaaagggtaccgatttggctgaagttgctccaaccctatgtgccggtgttactgtttacaaggctttgaaaagtgctaacttgaaggctggtgactgggttgccatctctggtgctgctggtggtctaggttctctagctgtccaatacgccaaggccatgggttacagagtcgttggtatcgacggtggtgaagaaaagggtaagttggtcaagcaattgggtggtgaagcctttgttgatttcaccaaaaccaaggacatggttgctgaaatccaagaaatcaccaacggtggtccacacggtgtcattaacgtctctgtttctgaagctgccatgaacgcttccactcaattcgtcagaccaactggtactgtcgtattggtcggtttgccagctggtgccgtcatcaagtccgaagtcttctcccacgtcgttaagtctattaacatcaagggttcttacgtcggtaacagagctgacaccagagaagctatcaacttcttcgctaacggtcacgtccactctccaatcaaggttgttggtttgtccgaactaccaaaggtttacgaattgatggaacaaggtaagattttgggtagatacgttgttgacacctccaactagggctgctgccccggctgctgctaatagtgatcccggccgctactaaagcctgatttgtcttgatagctgctcctgcctttgggcaggggcttttttctgtctgccattcttgaggatggcggactctttcccttttgctctacgcccatgaatgcgatcgcagtctcccctgtccagcacgttggagtgattggtggtggccagttagcttggatgctggcaccagcagcgcaacagttggggatgtcgctgcacgttcaaacacccaatgatcacgacccagcagtagcgatcgcggatcaaaccgtattagcagcagttgctgacgcggttctctcttctgccgtta

SEQ ID NO: 54 - protein, 56 aa, Artificial Sequence
  Synthetic Construct- Sequence No. 54, Example 54: designer selected Hyd1 transit peptide (amino acids sequence)
MSALVLKPCAAVSIRGSSCRARQVAPRAPLAASTVRVALATLEAPARRLGNVACAA

SEQ ID NO: 55 - protein, 45 aa, Artificial Sequence
  Synthetic Construct- Sequence No. 55, Example 55: designer selected RbcS2 transit peptides (amino acids sequence)
MAAVIAKSSVSAAVARPARSSVRPMAALKPAVKAAPVAAPAQANQ

SEQ ID NO: 56 - protein, 7 aa, Artificial Sequence
  Synthetic Construct- Sequence No. 56, Example 56: designer selected ferredoxin transit peptide (amino acids sequence)
MAMAMRS

SEQ ID NO: 57 - protein, 33 aa, Artificial Sequence
  Synthetic Construct- Sequence No. 57, Example 57: designer selected CF0CF1 subunit-a transit peptide (amino acids sequence)
MLAAKSIAGPRAFKASAVRAAPKAGRRTVVVMA

SEQ ID NO: 58 - DNA, 1417 bp, Artificial Sequence
  Synthetic Construct- Sequence No. 58, Exmaple 58:  designer nirA-promoter-controlled NADPH-dependent Glyceraldehyde-3-Phosphate Dehydrogenase DNA construct (1417 bp)
agaaaatctggcaccacacctgacccccatcgagagactccgaacgtggcaaatggagggaccagagttgttcagttcacaggtagataatgtcgcgggtcttgatagttagcaataaatacagtttcagaatatctgtaatacaaaaactgtatcgagacaagaaaaaagtagcaaaatttacaaatgttcatgattcatctggctaaattggatgttcaactgacccattgaagacaagggcaacaaccatgacttgcacttacagtttcttttgatgtcaaaagtgctccaatttgctcagcaacatctacaactctatttgaataaccccattcattatcataccaagcaataacttttactttattccctgacatgaccattgttgattttgcatcaataatagctgaatttggattagtattaaaatcaacagacactagtggttgatgttcgacttctatgataccttctaaacctgcattttcaaaagcttggtttacttcttctgcagttacttctttttctaaatcaacaactaaatcaacgagcgatacattctttgttggtacacgtaatgccatgccgtgtaatttaccttctaattctggtaatacttcttttaaagctttcgccgcaccagtagaagtaggaataatgctttcattacatgaacgtgcacgtcttaaatctttatgtggattatcaatatttttttggtcatttgtaatagcgtgaacagtagtcattaaaccattaactattccaaactgattatttaaaacttttgcaactggaccaatgcaattagtagtacatgaagcattactaaaaatgtcaaatgcttctatatctaattggttatcatttacgcctttaactaacatttgaacatgtccaccttttgaaggaccagttaacaatacttttttggcacctgctttaatatgtgcgatggctttatcaccatgattaaatttaccagttgcatctatagcaatatcgatatctaattctttccatggcaagttttcaggattgcgatcagcaaccaatttaattttatgatcaccaacttgcaatccattttcaatcggttcaacttttagattatattttccatgtgttgtatcgtaattgattaaatgtgcaattgtttcgggtggataactagcatttatcgctactacatttaaatttttattttgtaatgcaatacgtaataccattcttccaattctacccataccattaattgcaatattcgttgacattaaggctgagatcttcttcagtgcattgtagttgaatgaagggttaggggggaaatgcccccctattttttgtctagccatcctgccacgtttgacagggtagcaatttcgacacgatagggttctctcttctgccgtta

SEQ ID NO: 59 - DNA, 1387 bp, Artificial Sequence
  Synthetic Construct- Sequence No. 59, Exmaple 59: designer nirA-promoter-controlled NAD-dependent Glyceraldehyde-3-Phosphate Dehydrogenase DNA construct (1387 bp)
agaaaatctggcaccacacctgacccccatcgagagactccgaacgtggcaaatggagggaccagagttgttcagttcacaggtagataatgtcgcgggtcttgatagttagcaataaatacagtttcagaatatctgtaatacaaaaactgtatcgagacaagaaaaaagtagcaaaatttacaaatgttcatgattcatctggctaaattggatgttcaactgacccattgaagacaagggcaacaaccatgcttagagatgtgtgcgatcagatccagaactttgttggagtagccagtttcgttgtcataccaagaaaccagtttcacgaagttgtcgttcagagagataccggcgtcggcatcaaacacggaggtgcatacttcgccgttgaagtcggtagaaacgacggcttcgtcggtgtagcccagaacgcctttcatttcgccttcagaagcggccttcatcacgtcacagatctgctgataggtcgccggcttggccaggcgagcagtcaggtcaacaacggagacgttcggggtcggaacgcggaaagccataccggtcagtttgccgttcagctccgggatgaccttgccaacggccttggctgcaccggtagaggacgggatgatgttctggctagcgccgcggccgccgcgccaatctttcatggacgggccgtcgacagttttctgggtcgcggtggtagcgtgaacggtggtcatcagcgcttcaacgatgccgaagttgtcgttcaggactttagccagcggagccaggcagttggtggtgcaggatgcgttggaaacgatctcctggccagcgtagttcttgtggtttacgcccataacgaacatcggggtagcatctttagacgggccagtcatgacgactttcttggcaccggcggcgatgtgcttacgcgcggtttcgtcggtcaggaacagaccggtcgcttcggcaacaacgtcaacgccgatttcgttccacttcaggttagccggatctctttcagcggtaacacggatttttttaccgttaacgatcaggtggccatctttcacttcaacagtgccgttgaaacgaccgtgagtagagtcgtacttcagcatgtatgccatgtagttggcatccagcagatcgttgatgccaacgatttcgatgtcagaacgttcctgagcagcacggaaaacaatacggccgatacggccaaaaccgttgatacctactttgatagtcattaaggctgagatcttcttcagtgcattgtagttgaatgaagggttaggggggaaatgcccccctattttttgtctagccatcctgccacgtttgacagggtagcaatttcgacacgatagggttctctcttctgccgtta

SEQ ID NO: 60 - DNA, 1627 bp, Artificial Sequence
  Synthetic Construct- Sequence No. 60, Exmaple 60: designer nirA-promoter-controlled phosphoglycerate mutase DNA construct (1627 bp)
agaaaatctggcaccacacctgacccccatcgagagactccgaacgtggcaaatggagggaccagagttgttcagttcacaggtagataatgtcgcgggtcttgatagttagcaataaatacagtttcagaatatctgtaatacaaaaactgtatcgagacaagaaaaaagtagcaaaatttacaaatgttcatgattcatctggctaaattggatgttcaactgacccattgaagacaagggcaacaaccatgggccccgaacttttgcagcttgcccgcgtgcgccagcaggagcggcagcacgtgggtgccgtgcaggtcgccgagcgcgccccctgccgcctcgtcctcggtgaagcggcgggccgcgtcggcgcgcaggttggggccgtagagcaggaagggcaccgggtgccaggagtgcgccttcatcacgctgggcgtggagtggtcgccggtgatggcgatcacctcgggctccagcgccagcagctcgggcagcagggcgtcgaaggcctcgatcttgtgcaccttcgcgtcgaagtcgccgtcctcgccggtggagtcggtcttcttgaagtgcaggtagaagtagtcgaaggcttcccagtgggccttcagggccgcgagcttgccttcgggggcgtcggggtcctcgcccacctcgacctccagcgcggtcatccccaccagcgaggccaccccgcggtacatcgggtagctggcgaccgccgcgggggtgagcccggtgatctcgcccagggtgggccagaccgggcgcttggagacgccgcgaagcagcaccccgttgatcctgggctcgtccgcgagcgcctgccgcgccagcgcgctgaacttgttgagcacgtcggccgtcttggcgctgggctcgtcgctttcgtcgtgcggacgggccgcgagcggcggcaccccggtcttctgggggtcggtgtcgtggacccggtcgcccagccccacgccccgcagcaccagcacgaagcggtgctccgactcggtgtggagctcgatcctgacgccgtcgatctcgcggatgcgctccctcagcttggcgagcacccgccggttttcctcggtgggggggcggccggcgcggcggtcggcgatggtgccgtcggggttcaaggtggcgaagttgccgcgcaccgcgacgtcgtcgggccccagctcgatgcccagccccagcgccgagaggacgccgcgcccgacctcgtagcggaaggggtcgtagccgaagaggctcaggtggccgggcccggagccgggcgcgaagccgggggccaccagggtgactcgccccaggttggccttttcggccagggcgtcgaggttgggggtgcgggccgcggccagctccgtgggcccgcccggctcgcggggcagcccgcccaccccgtcgagcacgacgaagaggatcttgctgggcgtggtgcggctcagttccttgaggtgggggaggaggtccattaaggctgagatcttcttcagtgcattgtagttgaatgaagggttaggggggaaatgcccccctattttttgtctagccatcctgccacgtttgacagggtagcaatttcgacacgatagggttctctcttctgccgtta

SEQ ID NO: 61 - DNA, 1678 bp, Artificial Sequence
  Synthetic Construct- Sequence No. 61, Exmaple 61: designer nirA-promoter-controlled Enolase DNA construct (1678 bp)
agaaaatctggcaccacacctgacccccatcgagagactccgaacgtggcaaatggagggaccagagttgttcagttcacaggtagataatgtcgcgggtcttgatagttagcaataaatacagtttcagaatatctgtaatacaaaaactgtatcgagacaagaaaaaagtagcaaaatttacaaatgttcatgattcatctggctaaattggatgttcaactgacccattgaagacaagggcaacaaccatgtttttgtaaattatagaaaacccccaacccacgatacagcccgatatcgcttaattcttcttctatccgcaacagctggttgtatttcgctacccggtcagtcctggccggagccccggtctttatctgccctacgttggtcgctactaccaggtcagcgatgaaggtgtcctccgtctccccggaacggtgggatactacacaggtgtaaccggctcttttagccatttcaatcgtatccaaggtctcagtgaccgtgcctatctgattcagtttgataagtatgctgttggccacacccttttttattcctgtggtaaaacgctggggattggttacgaaaatatcatctccgacgatctgaatcttcttgcccagcttacgggtgagctttttccacccttcccagtcttcttcctgcagcccgtcttccagggatatgataggatacttacgcacaaggccatcgtaaaactcgaccacctcatcggcggtcagctcttggccggtgctggcaaaaacgtatttcccgtccttgaaaatctcattggcagcaacatccagtcccaggtaaatatccttccccggcttgtaccccgccgttttaatagcctccaaaattacttcaatcgcggcttcattcgaaggcaagttgggagcaaatcctccttcatccccgatggaagtagaaaacccttttttactcaataccttcttcagggtatggtagacctccacccccatgcgcagggcctcggcaaaagaagtagctcctaccggtaggatcaagaattcttgaatgtccacattattatccgcgtgcttgccgccgttcaagatgttcatttgcgggatcggcagttctttggcgtttacgccgcccaggtactggtaaagcggcatggataggtaggaagcagcagcccgcgccacagccatcgacacgcctaagatagcgttagctcccagcttgcccttgttgtcagtcccatcgaggtcaatcatcaaccggtcaatccccacctggtcgagcgcatccatccccacaacctccggggcgatgaccgtgttgacgttatccaccgcattcagcacgcctttgccgccgaaacgctctgcgtccccatcccgcagttccaccgcctcaaaagcaccagtggacgcgccggaaggaaccgcagcccgtcccatggtcccatcttctaaaaggacctcgacctccaccgtcgggtttccccgcgaatccagtatttctctggcgtaaacctcggtgataatactcactaaggctgagatcttcttcagtgcattgtagttgaatgaagggttaggggggaaatgcccccctattttttgtctagccatcctgccacgtttgacagggtagcaatttcgacacgatagggttctctcttctgccgtta

SEQ ID NO: 62 - DNA, 2137 bp, Artificial Sequence
  Synthetic Construct- Sequence No. 62, Exmaple 62: designer nirA-promoter-controlled Pyruvate Kinase DNA construct (2137 bp)
agaaaatctggcaccacacctgacccccatcgagagactccgaacgtggcaaatggagggaccagagttgttcagttcacaggtagataatgtcgcgggtcttgatagttagcaataaatacagtttcagaatatctgtaatacaaaaactgtatcgagacaagaaaaaagtagcaaaatttacaaatgttcatgattcatctggctaaattggatgttcaactgacccattgaagacaagggcaacaaccatgccgcacttgggcttggccgcggtagatttgtcccctagccgtatccatggttatggtttctccgtcttggatgacacgggttgcctcggcggctccaacgatgacaggaatatccaagttaatacctactatggctgcatgagaagtcaggcctccctgttccgtgataatccccccggccttttccaacaacggcatatagtccttgtctgttccgactgccaccactatatctcccggagcaaacgagcccggtttgcccggatccagtatcacccgcgccttactggtaacggcccggctacctatacccgttcccttaaccagcaccttgcctactacttgaactctcagtagattggtagtcccagggattccaggagtacctgcggttatgactaccaggtcaccgggggagattagccctcgcctgactgcggcatccagggctgtttctatcatctggtcagttccgtgggtttccgggaccgtgagcgcgtataccccccataccaaagttagcttgcgtaccacttcgggtgaaggcgtagtagccacgatcggagcccggggacggtacttggccaccattctcgccgtatggcccgattttgtagcagtaacaatggccgaggcccccaggtcggtagcggtagcacaggtggcataactgatggcatcggtcacggtacgcctgccttcgaatcgtcttgccgccagcatgttctcatagggcaaagccatctccgtccgccgggctattcgcgccatggtttccaccgcaactaccggatatttaccggctgcggtctctgccgacagcataatggcgtctgccccctcaaatatggcattagccacgtctgacgcttcggcccgggtggggcgcggcacgtttaccatcgattcgagcatctgggtggcaattatcaccggcttaccctgagcccggcatttctcgattataaccttttgcaccagaggtacttcttcggtaggtatttcaacccccaggtctccccgggcgaccatgacgccatcagcaacctttattatgtcatccaggttgtccagcccctcctggctctcaatcttagcgattatatcgatgtcggctcccttttcctctaatatgcgtctgatatccaaaacatcatcggccgtccttacgaacgaggcagcaatgaaatccatattctgctggatgccgaagttaatgtcttcgatgtctttctggctcaaaaaaggcaggttggttctcacacccggcaggtttatgcctttcctttcaccgagtactcctcccgcaaccacctggcagacgatgtcggtgtcgttcgcctctaaaacagacagctggatgacgccgtcagcgatcaatatgcagtcacccgcttttacctgcgaaggtaactcatggtaacttatctggacctcgtcttcgttaccttcaaccggacggttggtgagaacgaacttttgaccaggacgcagctctatcttaccttctttcaagggcccggtcctgatctccggccctttggtatcaagcatcaaccctacttccgcattcagttcccgcgccacctcacgcaccatgcggatgcggcgctcatgctcatcataagtgccgtgtgaaaaattcaaacgggccacgttcatgccgttggtgatcaaagctcttagccgctcataatcatcggtggaaggtcccagggtacagatgattttggtcttccgcaataaggctgagatcttcttcagtgcattgtagttgaatgaagggttaggggggaaatgcccccctattttttgtctagccatcctgccacgtttgacagggtagcaatttcgacacgatagggttctctcttctgccgtta

SEQ ID NO: 63 - DNA, 2163 bp, Artificial Sequence
  Synthetic Construct- Sequence No. 63, Example 63: designer nirA-promoter-controlled citramalate synthase DNA construct (2163 bp)
agaaaatctggcaccacacctgatctgcaagagacgctcacgcgatacctctgggcgtgcaatcaccgcattccccaacgcgctttgggccacatgacccccatcgagagactccgaacgtggcaaatggagggaccagagttgttcagttcacaggtagataatgtcgcgggtcttgatagttagcaataaatacagtttcagaatatctgtaatacaaaaactgtatcgagacaagaaaaaagtagcaaaatttacaaatgttcatgattcatctggctaaattggatgttcaactgacccattgaagacaagggcaacaaccatggagcaggtttttatctacgacaccaccttgagggatggctcgcaggcagaaggtataaacttttccgtagaggataagatgcgcatacttcaaaaactggacgaatttggagtgcattacatagagtgcggatggcccggtgcgaacccaaaagacactattctctttgaaaggctgagaaagataaaaactcaaaatgccaaaatagtagcctttggtgcaacaagaaaagctggaaagaaggcgcacgaagataagcaggtggaaaaccttttgaaatcgggtgccaaggtgataaccgtatttggcaagagctgggactttcatgtaacgcatgccatagggaccaccttagaggaaaacctggacatggtttacgagacggtaagctatcttaaaaagcatgtggaggaggttatctttgacgcagagcacttctttgacggatacaggcacaacgaaagctatgcttttaaggtattggaggcagcttttcaggcaggtgcggactggatagtcctctgcgataccaacggtggcacccttcccaatgaggtttatgagataaccaaaaaggttgtacaaaagtttccacaggcacgcgtaggcatacacgctcacaacgattcagatactgctgtggctaactctcttatggcggtgcttgcaggtgcaaggcaggttcacggcactataaacggcttgggggaaagaacgggcaatgctaatctgtgttccataatacctaaccttcagctcaagctgggctttagtgtagtgccttcccaaaacctcaaaaagctcaccgagcttgctcactttgtctccgaaatctccaacacgccactgcccaaaaacatgccttatgtaggggagagtgcttttacccacaaagcaggcgtacacgcctctgcagttatgaaaaggtcagaaacatacgaacacatagacccttctttggtaggaaacagaaggaaggtgacagtgtctgacctttctggaaggagtaatatactttacaagctcagggaaatggggcttgaggtggatgataagtcccctgagcttatcaaactccttgaaaagataaaggaacttgagaaggaaggctaccactttgaagcagctgaagcttcttttgagcttctttgcaagaggcattttgggcttgttaaaaactattttgaccttgatgcttacagggtgctaatagccagaaggagtacagacctatctcctgtttcggaagccaccgtaagactctatgtggaagacataaaggagcatacagcagctcttggtaacggaccagtgagcgcccttgacagagccctcagaaaagccttggaagagttttatccaagccttaaagatgttcagctcatagactacaaggtgagaatagttaacgaatcggagggtacatctgccaaagtgagggtgcttatagaatctaccgatggtagaagaaagtggggaacggtgggagtttcggaaaacataatagaagcctcttggatagccttaactgatagcctcgtatataaactcttaaaagacgaagaagagggtataatgtgataaggctgagatcttcttcagtgcattgtagttgaatgaagggttaggggggaaatgcccccctattttttgtctagccatcctgccacgtttgacagggtagcaatttcgacacgatagcgtgctgtactgttttttgctcgtcagggttgggttttgtcatcgacacccaaggattggagtcggtgctcaataatcgccagttgctgttgggcagccgccaattgcgcctgaggttctctcttctgccgtta

SEQ ID NO: 64 - DNA, 2878 bp, Artificial Sequence
  Synthetic Construct- Sequence No. 64, Example 64: designer nirA-promoter-controlled 3-Isopropylmalate/(R)-2-Methylmalate Dehydratase DNA construct (2878 bp)
agaaaatctggcaccacacctgacccccatcgagagactccgaacgtggcaaatggagggaccagagttgttcagttcacaggtagataatgtcgcgggtcttgatagttagcaataaatacagtttcagaatatctgtaatacaaaaactgtatcgagacaagaaaaaagtagcaaaatttacaaatgttcatgattcatctggctaaattggatgttcaactgacccattgaagacaagggcaacaaccatgtaccatgtctgctgttgctatctcgcccttgattgctgatgctgtaacagtagccgctgaagcaagatatacaaaagaatctttatgtcctgcacgtcccttgaagtttcgtgtacctgtactgataagagtctcaccctcaccgataacaccctgacagcttccccagcatacagagcagttaggattcataacaattgcacctgcgtccatgaatatatcaaggagtccctctttcatagcctgaagatataccgaacggcttgcaggaactacaaggaatcttaccttaggagcaacctttttccctttgatgatcgctgcgccaactcttaaatcctcgattcgtccattgttacatgaaccaagaaatgcttcatcaatctttacaccaagtgattccttagccggaactacattgtcaacaaaatgtggctttgcaacaattggctgtattgttgaaaggtcaatatcataaacctgctcaaatactgcatcatcatctgatgtaaagcatgcctttggctctctgccatgctccttaagataatccattgcaacatcatcaacttccatgagtgcagtcttagcacctgcctctacacaaaggttacagattgatattctgtctgccattgaaaggctgtgtaagccttctcctgcaaattccattgctttatagttagcaccgttagcgccaatctttccaataatagagagtattaaatctcttgcatatactccatcgttaagctttcccttaaggttgaatcttaatgttcccggaaccattacccatgatgttcctgtaaccattgcatacaaataatctgtacaaccaacacctgtaccaaatgcacctaacgcaccatatgcacaagtatggctgtctgctccaaatataagctcacccggcactacatgattttccatcataacctgatgacacacaccctcgccctcgtagaacttaatatcattagccttagcaaagtctctcatcttcttctgtgaggctgctgtcttaggactgtctgatggaatattgtggtctacaatccatacaagcttatccttgtcagcaatatgaggattctttaacttctcatacataccaatagtaagatgtgttgttccatcattactcataagtctgtcaagagtaacagttgcaatatcaccagccttaacctgtgaaagacctgctgcccttgcgataatcttctctgcaatagtcatgccatgctttgcctcatctgcaggtacggctgtactctcagactcttctttctcaccatcaagtgatgcaataagaccaccctgattaagaatagcctgcatcttggctggaagcttagtacatgtataagtctttccattaacagttataattccatcttctaatgaaagctcacattcatcccccgcattaacttcgtcatggagttctttacatacaataacaggaagtcctatattaatagcattacgatagaatattcttgcaaatgatttggcaatcactgccttgacacctaatgccttaagtacgcttggtgcctgctctcttgatgaaccacatccaaagttgtcatctgcaacaacgaaatctcccggctttacggcagaagcaaaatcagagtctaatgattcaaatgtatgactcttcatctcatcaattgtcggaaacaaaagatactgcgatgcaataatctgatctgtatcaacatctttatcaaacttaaatatcctacccattgacccccatcgagagactccgaacgtggcaaatggagggaccagagttgttcagttcacaggtagataatgtcgcgggtcttgatagttagcaataaatacagtttcagaatatctgtaatacaaaaactgtatcgagacaagaaaaaagtagcaaaatttacaaatgttcatgattcatctggctaaattggatgttcaactgacccattgaagacaagggcaacaaccatggtcaagaccgttaagctttctcattgccttaacaagtccgcctgcattaagtatatccacaagattatcaggaagtgaagcaataggatatgcttttccattgtgtgtaatctttgcatttacttcaacatcaatagtatcgccttccgtaacttcgtcgtgaaggtctgcattctctataaggagaagtccgttattaatagaatttctgaagaatattcttgcatatgatttggcaataacacatttaatacctaatgccttaataacctcaggtgcctgctctcttgatgaaccacaaccaaagttctttcctgcaacaatgatgtcgcctggcttaatctgacctgcaagttctggtcttaatggcgaaaatgcatatggtttcatatcttctactgtctttaatgcaaggtactctgtagggataatgatatctgtatcaatgtcatcaccaagtacccatactttaccgctaaatttctcgttcattaaggctgagatcttcttcagtgcattgtagttgaatgaagggttaggggggaaatgcccccctattttttgtctagccatcctgccacgtttgacagggtagcaatttcgacacgatagggttctctcttctgccgtta

SEQ ID NO: 65 - DNA, 2380 bp, Artificial Sequence
  Synthetic Construct- Sequence No. 65, Example 65: designer nirA-promoter-controlled 3-isopropylmalate dehydratase DNA construct (2380 bp)
agaaaatctggcaccacacctgacccccatcgagagactccgaacgtggcaaatggagggaccagagttgttcagttcacaggtagataatgtcgcgggtcttgatagttagcaataaatacagtttcagaatatctgtaatacaaaaactgtatcgagacaagaaaaaagtagcaaaatttacaaatgttcatgattcatctggctaaattggatgttcaactgacccattgaagacaagggcaacaaccatgaatgaatcttcttggatctgtgatgtatccggttaccgcggtggctgccgccgttgcaggagaagcaaggtatatctccgcattgggattccccatccttcccttgaagtttctgttctgcgtggaaagtaccctctctccgtctccaagaacacccatgtggattccaacacatgggccgcaacctggtggtataactgccgctccgagttcaacaaatttcttgattattcccttttcaagggcgtccatgtagaccttccttgaagcggggccgacgatcagcctcacatccgggtgctttccgtgtttctcaagaattttcaaagcgatctcaagatcctgaagtcttccgttcgtacaggttcctatgaacacttgatctatctttatcttttccttttcaacctcgctcacctttctcacgttgtccacatagtgaggcaaagagacgagtggttcgagtgtgtcggcatctatctctatctctgtctcgtaaaccgcgtctggatctgctttcaactctctgaagtcctcctctcttcccatctttttcaggaactctctggtcttctcatcagaaggcatgagacctgctttcgctcccacttccaccgccatgttggaaatggtgagtctgtcctccacattcatattttcgatacagcttccatggaactccaacgctttgtaagttgcgccgtcgcttcccagaattctcgcgatctcgagaatgatgtctttcgcgtaaactccatcctgtaacttcccgttcaccacaaccttgatcgtctcaggtactttgaaccagttctgtccaagcccgaagatgatcgcaacatctgtggaccccattcccgttccgaaagcaccgagcccaccggcagtgcaggtgtgcgaatccgcacctgctaccagatcgccgggtttcacgtatttttccgcgaggatctggtgggatatcccgtctcccgcatcgaaaaccttgactcccatctcttttccaaattctctcatcatcttctgcgaattcgaaagctctttcctcgggctcggagaagcgtgatcgatgaagaggaaggccttcgggaccttcacttctttgaagccgagttctctgaattcgtttatcatcagggggcctgttccatcctgggccatggctatatccactctcgcgagtacgatttctccggctttcacgtctcttccagtatgttcagaaaagatcttttctgcgagtgtcttacccattgacccccatcgagagactccgaacgtggcaaatggagggaccagagttgttcagttcacaggtagataatgtcgcgggtcttgatagttagcaataaatacagtttcagaatatctgtaatacaaaaactgtatcgagacaagaaaaaagtagcaaaatttacaaatgttcatgattcatctggctaaattggatgttcaactgacccattgaagacaagggcaacaaccatgaactcttgggaaggaaccgtgctttttcagatagttcactataccgtcttctttcagtatctcgaggagaaacttcggaatcggagtgaatctgtattcttttcctgttgtgaggttcttcaaaacaccgttttcgagatctatctcaagttcgtctccctggttgatctcgtcgacttccttgagctctatgactggaagtcccacattgatggcgtttcggtagaagatccttgcgaaagacttcgccacgatacaggaaacaccagcgatctttatgatacgcgcagcgtgctctctggaagaaccaagtccgaagttcttgccagccacgatgatgtcacctttctgcaccttcttcgcgaaatcctccatggcatcttccaagacgtgttttgcgagctcctcaagattgttcctcagatgaaaataccttccaggtgctatatggtcagtcgatatattgtcaccgaatttccagactcttccccttatcattaaggctgagatcttcttcagtgcattgtagttgaatgaagggttaggggggaaatgcccccctattttttgtctagccatcctgccacgtttgacagggtagcaatttcgacacgatagggttctctcttctgccgtta

SEQ ID NO: 66 - DNA, 1456 bp, Artificial Sequence
  Synthetic Construct- Sequence No. 66, Example 66: designer nirA-promoter-controlled 3-Isopropylmalate Dehydrogenase DNA construct (1456 bp)
agaaaatctggcaccacacctgacccccatcgagagactccgaacgtggcaaatggagggaccagagttgttcagttcacaggtagataatgtcgcgggtcttgatagttagcaataaatacagtttcagaatatctgtaatacaaaaactgtatcgagacaagaaaaaagtagcaaaatttacaaatgttcatgattcatctggctaaattggatgttcaactgacccattgaagacaagggcaacaaccatgccatatttcttcgagttttttacatatgagatctcccatctgagaggtcgaaaccgccttttctggatcctctgcgatgtctctggttctgtatccctcttctatcaccagctcaaccgctctttctatctttcttgcctcttccaccattccaaaggaatgctcgagcatcatggcgagagagaggatctgtgcgatcgggttggcgatgttctttccggctatatcaggagcggaacctcctgccggctcgtagaggttcttatcaccgaaagacgcggacggcagaagaccaagagaaccaggaagtgccgcactctcatccgagagaatgtctccaaacatgttcgttgtgaggatcacatcgaactgcgatggtttcaggatgagctgcatggcagcgttgtccacatacatgtgcgtcagctccacatcagggtattctctcgctacttcgttcacaactttcctccacagcatggaactgtagaggacgttcgctttgtcaacggaggtgaccttttttcttctgttttttgcgatttcaaaggcagttctcgcgatccgttccacggtttttctgtcgtagatcatggtgtcgaatcccttttcttcatccaatcccctcggctggccgtagtaaactccgtaggaaagttccctgacggtcacaagatcgaccccggatccaatcaccttttctttcaaaggagagacatgcacaagcgatctgtagacctttatcggtcttatgtttgcgtaaaggttgagcatcttccttagggcaagaagcccccctatttccggcctcttctccggaggaagatcgtcccatttaggtcctccgacgcttccaaggaagatcgcgtcggcttccagacatatcttttttgtctcttcaggaaggggttcaccgaatttgtctatggcatcccctccgatgtgtccaaagactttctcaaaggttttccccgttttcttttccaccacctcgagcactttaagagcttcccttacaacctcgggacctatgccgtctccaggcaaaaccgctatcttcattaaggctgagatcttcttcagtgcattgtagttgaatgaagggttaggggggaaatgcccccctattttttgtctagccatcctgccacgtttgacagggtagcaatttcgacacgatagggttctctcttctgccgtta

SEQ ID NO: 67 - DNA, 1933 bp, Artificial Sequence
  Synthetic Construct- Sequence No. 67, Example 67: designer nirA-promoter-controlled 2-Isopropylmalate Synthase DNA construct (1933 bp)
agaaaatctggcaccacacctgacccccatcgagagactccgaacgtggcaaatggagggaccagagttgttcagttcacaggtagataatgtcgcgggtcttgatagttagcaataaatacagtttcagaatatctgtaatacaaaaactgtatcgagacaagaaaaaagtagcaaaatttacaaatgttcatgattcatctggctaaattggatgttcaactgacccattgaagacaagggcaacaaccatgctcagcacccccgttttttctgagaaggcctttagcgatgaggtacttgtttattgcgtttatgtaagctatcgcagaggcttccactatgtccgtggagacaccccttccactgtagagttcaccgtttattctcaacgtgagtttgacctctccctgtgcgttctttccagttccaaccgcctgaattatgtactcctcgagcttcggttgaataccgagcgctttgtctatagccttgaagatagcatccactggaccgtttcctgcctctgctgcttctttcttttcatctccaacctgaagcacgaccgccgcggttggaagcagcgtgtttccggtgtgtacatggaagtgaacgagcttgtaaccgttgatgggctccctcaaaacttccgagacgatcgagaaaagatcatcgtcgtaaacctctttctttctgtcggcgagttctgtgaacttctcgaacactttctggaaggtctcttcgtcgagtttgatgccgtagctctccagcttctttctgagggcgtgctttccggagtgtcttccaagcacgagcgtctcggaagacctgccgatatcggatggtttcatgatctcgtaggtctccctgtgtttcagcacaccatcctggtgtatacccgactcgtgaaggaacacgttctctcccactatgggtttgtttctggacgggatgagccccgttatatgtgtgaggagcctggaagcggggtatatgagctctgtctttatacccgtctcgtagggaagtttgtctttcctcaccttgaggatcatcacgaactcttccagggcacagtttcctgccctctctccgataccgttcagagtcacttcgacctgggtggctccgttctgaacggcagcgagggagttcgccacagcgagtccaagatcgttgtgacagtgcacagaaagatcgacattctctataccgggcacaccctctctcaaggtctttatgagttctccaaactcatcgggaagggcgtaccccaccgtgtccggaacattgatcgttgtggctccggcttcgatcgccgtcttgtaggcttctatcaaaaagggaacctccgttctcgaagcgtcttccgccgagaactccacaaggtcgaaaaactgttttgcgtagccgacgtatcttctgatcctctcgaggatttcctctttctccattctcagtttgtattttctgtgaatcggagaggtcgctatgaaaacgtgtatcatacgtttgtcttttggtcgatccttgagagcctcgtacaccgcgtctatgtccttttcaacacaccttgcgagtcccaccactatgggtttctgaacggcgctcgcaactctttttacagcttcaaactgcacgggagatgaaacgggaaacccagcctcgatgagatcgacaccgagatcctctaacatgagtgccatttctactttttcctcaaccgacatcgaagcccctggggattgctctccatccctcaacgttgtatcgaagatcttaattctcctcattaaggctgagatcttcttcagtgcattgtagttgaatgaagggttaggggggaaatgcccccctattttttgtctagccatcctgccacgtttgacagggtagcaatttcgacacgatagggttctctcttctgccgtta

SEQ ID NO: 68 - DNA, 2632 bp, Artificial Sequence
  Synthetic Construct- Sequence No. 68, Example 68: designer nirA-promoter-controlled Isopropylmalate Isomerase DNA construct (2632 bp)
agaaaatctggcaccacacctgacccccatcgagagactccgaacgtggcaaatggagggaccagagttgttcagttcacaggtagataatgtcgcgggtcttgatagttagcaataaatacagtttcagaatatctgtaatacaaaaactgtatcgagacaagaaaaaagtagcaaaatttacaaatgttcatgattcatctggctaaattggatgttcaactgacccattgaagacaagggcaacaaccatgacagaccggctcggcttcaagctggcgcacatcgacaaaatgtccgtaaatcgcagccgccgcggccatcaccgggctgacgagatgcgtgcgcgccccttttccttgccgcccttcaaagttgcggttcgacgttgacgcacagtgctcgccttctgggatgatgtccgggttcatgcccaaacaggcgctgcagccggagtcgcgccattcaaaaccggcgtcgatgaaaatttgtgccaacccttccgcttcggcttgttttttcacttgctgcgatccaggcacgacgagcgcccgtacaccaggagccacttttttccctttcacgatgctcgccgccgcgcgcaaatcgctgaggcgtgagttggtgcacgaaccgatgaagacgtgctgcaccggaatatccgtaatcggcgtgcccggcttgagccccatgtactcaagcgcccggcgcaccgcgttttgctctgttttgctttcaaattgctcgggatgcggcacgacgccatcgacggaagtgctcatcgcggggttcgtcccccacgtcaccatcggagcgatcgtcgacgcatcgatttcaatcgttttatcgtattttgccccctcatcgctggctaacgcccgccaccgttccaccgccttgtcaaactcctcgccttttggtgcatatttgcggccgcgcaaataggcgaacgtcgtttcatccggactgatgaggccggctctcgccccagcttcaatcgacatgttgcaaatcgtcattcgctcttccatcgacatgcgtcggatcgcttcgcctgtaaattcgataatataaccggtgccgacgccaacgccatagcggccgataatggccaagatgacgtctttggcggtcactcctttgccgaggcggccgttgatgcagatttgcagcgttttcggcttatgctgccaaagcgtttgtgtagccaatacatgctcgacttcgctcgtgccgatgccaaacgccaaggcgccaaacgccccgtgcgtcgacgtatggctgtcgccgcaaacgatcgttttccccggctgggtcaacccgagctctgggccgatgacgtgaacgattccttgctcttcgctgtgtaggtcggcgagcggaatgccgaactcgcggcagttgcgctcaagcgcagcgatttggttgcgcgccacttcgtcggtaatcacaaatcggttaacggttggcacgttatggtccatcgtcgcaaaggtcaaatccggccgccgcaccttccgtcctttttgccgcaacccttcaaacgcttgcggcgaggtcacttcatgcactaagtgcaaatcgatgtacaataaatccggtttgccctcctcacggtagacgacgtggttttcccaaattttatcgatgatcgttttcggcttcattgacccccatcgagagactccgaacgtggcaaatggagggaccagagttgttcagttcacaggtagataatgtcgcgggtcttgatagttagcaataaatacagtttcagaatatctgtaatacaaaaactgtatcgagacaagaaaaaagtagcaaaatttacaaatgttcatgattcatctggctaaattggatgttcaactgacccattgaagacaagggcaacaaccatgcggccgtggacaatgccgtcgttcgtaggcggcgatatgcgcttcgtacacaaacgtcaaatcaatttcgtcccatccttttagcaacagctgttttcgatacgggtcgatgtcaaacggacgcgaaaatccttcatcgtcaaatacccgctgttcttcaagcgaaaccgtcagttcatagtctgcgcgctcgctttggcgcagcaagtagcggacatcctctttatccagccggatcggcaacagtccattttttaagcagttgttgtaaaaaatatcggcaaacgatggggcaatgattacgcggaatccgtaatcttgcagcgcccacggcgcatgttcgcgcgatgagccgcaaccgaagttttcatcggcgactaaaatcgtcgccccttcgttttccgggcggttgagctcaaactccggatttggcgtgccgtcgctcaaataccgccaatcgtaaaagagaaactggccaaagccggtgcgttcaatccgtttcaaaaactgctttggaatgatttgatcggtatcaatattcgcccgatcgatgccggcggtttttccgcgatggatcgtaaacggcttcattaaggctgagatcttcttcagtgcattgtagttgaatgaagggttaggggggaaatgcccccctattttttgtctagccatcctgccacgtttgacagggtagcaatttcgacacgatagggttctctcttctgccgtta

SEQ ID NO: 69 - DNA, 2035 bp, Artificial Sequence
  Synthetic Construct- Sequence No. 69, Example 69: designer nirA-promoter-controlled 2-Keto Acid Decarboxylase DNA construct (2035 bp)
agaaaatctggcaccacacctgacccccatcgagagactccgaacgtggcaaatggagggaccagagttgttcagttcacaggtagataatgtcgcgggtcttgatagttagcaataaatacagtttcagaatatctgtaatacaaaaactgtatcgagacaagaaaaaagtagcaaaatttacaaatgttcatgattcatctggctaaattggatgttcaactgacccattgaagacaagggcaacaaccatgtatacagtaggagattacctgttagaccgattacacgagttgggaattgaagaaatttttggagttcctggtgactataacttacaatttttagatcaaattatttcacgcgaagatatgaaatggattggaaatgctaatgaattaaatgcttcttatatggctgatggttatgctcgtactaaaaaagctgccgcatttctcaccacatttggagtcggcgaattgagtgcgatcaatggactggcaggaagttatgccgaaaatttaccagtagtagaaattgttggttcaccaacttcaaaagtacaaaatgacggaaaatttgtccatcatacactagcagatggtgattttaaacactttatgaagatgcatgaacctgttacagcagcgcggactttactgacagcagaaaatgccacatatgaaattgaccgagtactttctcaattactaaaagaaagaaaaccagtctatattaacttaccagtcgatgttgctgcagcaaaagcagagaagcctgcattatctttagaaaaagaaagctctacaacaaatacaactgaacaagtgattttgagtaagattgaagaaagtttgaaaaatgcccaaaaaccagtagtgattgcaggacacgaagtaattagttttggtttagaaaaaacggtaactcagtttgtttcagaaacaaaactaccgattacgacactaaattttggtaaaagtgctgttgatgaatctttgccctcatttttaggaatatataacgggaaactttcagaaatcagtcttaaaaattttgtggagtccgcagactttatcctaatgcttggagtgaagcttacggactcctcaacaggtgcattcacacatcatttagatgaaaataaaatgatttcactaaacatagatgaaggaataattttcaataaagtggtagaagattttgattttagagcagtggtttcttctttatcagaattaaaaggaatagaatatgaaggacaatatattgataagcaatatgaagaatttattccatcaagtgctcccttatcacaagaccgtctatggcaggcagttgaaagtttgactcaaagcaatgaaacaatcgttgctgaacaaggaacctcattttttggagcttcaacaattttcttaaaatcaaatagtcgttttattggacaacctttatggggttctattggatatacttttccagcggctttaggaagccaaattgcggataaagagagcagacaccttttatttattggtgatggttcacttcaacttaccgtacaagaattaggactatcaatcagagaaaaactcaatccaatttgttttatcataaataatgatggttatacagttgaaagagaaatccacggacctactcaaagttataacgacattccaatgtggaattactcgaaattaccagaaacatttggagcaacagaagatcgtgtagtatcaaaaattgttagaacagagaatgaatttgtgtctgtcatgaaagaagcccaagcagatgtcaatagaatgtattggatagaactagttttggaaaaagaagatgcgccaaaattactgaaaaaaatgggtaaattatttgctgagcaaaataaatagtaaggctgagatcttcttcagtgcattgtagttgaatgaagggttaggggggaaatgcccccctattttttgtctagccatcctgccacgtttgacagggtagcaatttcgacacgatagggttctctcttctgccgtta

SEQ ID NO: 70 - DNA, 1426 bp, Artificial Sequence
  Synthetic Construct- Sequence No. 70, Example 70: designer nirA-promoter-controlled NAD-dependent Alcohol Dehydrogenase DNA construct (1426 bp)
agaaaatctggcaccacacctgacccccatcgagagactccgaacgtggcaaatggagggaccagagttgttcagttcacaggtagataatgtcgcgggtcttgatagttagcaataaatacagtttcagaatatctgtaatacaaaaactgtatcgagacaagaaaaaagtagcaaaatttacaaatgttcatgattcatctggctaaattggatgttcaactgacccattgaagacaagggcaacaaccatggggtatcaggactgccctgcctagaacttcacctttctctagcctctcaagcacatcgtttatttcatctagcttgtggatatcaacctctaccctgaccttaccctgaagggctaacgtgactagctcatggagctctacatagtttcctactaggcttccttcaaaggatacctcagaggatatcaccctgatcgtggggaatctaagctcacccccatagcctacgatgataagcctccccatcctccctagcaggtatggtgtataatcgactgtagcctgagagcctacgaagtccattgcaacgttaactcctctccccctggtaagctccatgacctgctttacagggtctcgtctagcgtcaaccacgtgatccgctccaagcctctcggccagctttagtttttcttccttaacgtccagtgctatcaccgtcgcgggtgtcataactttaagtagctgaactgcaatatgacctaatcctcccacgcccactatagcgacgtatgcgccgggatagagggttcgggcggccttcttaacagccctataagccgttatcccagcgtccgctagaggggccatttcaacaagtttctccctgctaatatccttaggcagctttatcacagacctgtgcgaggtcctcatgaactctgcaaatccaccatcgatattaagtcctgggaactctaggttctcgcagtgcatatcctcaccagctctacaggctagacaggttccatctgtgaccgccgggtgaagaattaccgggtcccccttctctaagccttccactccttcggcaacttcttcaatatacccgacgttctcatggcctaaagtgtagggtagcttaggctgcaatagctcatgccacattccctggacaaggtggaggtccgtatggcatacgccagcgcctgcaatccttacaataacgtcaaatctaccttctagcctcggatagtcgacatcctctatcctcaacggcttgttatactcgtggagcctggcagctttcaataaggctgagatcttcttcagtgcattgtagttgaatgaagggttaggggggaaatgcccccctattttttgtctagccatcctgccacgtttgacagggtagcaatttcgacacgatagggttctctcttctgccgtta

SEQ ID NO: 71 - DNA, 1468 bp, Artificial Sequence
  Synthetic Construct- Sequence No. 71, Example 71: designer nirA-promoter-controlled NADPH-dependent Alcohol Dehydrogenase DNA construct (1468 bp)
agaaaatctggcaccacacctgacccccatcgagagactccgaacgtggcaaatggagggaccagagttgttcagttcacaggtagataatgtcgcgggtcttgatagttagcaataaatacagtttcagaatatctgtaatacaaaaactgtatcgagacaagaaaaaagtagcaaaatttacaaatgttcatgattcatctggctaaattggatgttcaactgacccattgaagacaagggcaacaaccatggcgtacccagacacctttgaaggatttgccgtcactgacactgcaaaatggtccacaaccaagaagatagaattcaccccaaaaaggttccaggaacatgatatcgatgtcaagatccatgcctgtggtatctgcgggagtgatgttcacactgtttgcgggggatgggcaaaaccagaccttcccgtgatcccaggacatgagatcgttggtgaggttgttagagtgggcccaaaagtgaagggatttgaaattgggcaaagagttggtgttggagctcaagtttgggcctgtctagagtgcgacacatgcaaggataacaacgaaacgtactgtcctcaatgggtggacacttacaatgccacttatcctgatggtgacaaggcatggggtggttattcctctcacatcagagtccacgatcactttgtattccctattcctgatgaacttccaactaatgctgtggccccaatgttgtgcgctggtatcaccacgtactctccgttggtaagaaatggagctggtccaggaaagaaggtgggtatcatcggaattggagggttgggacattttgccatcatgtgggctagggctcttggttgcgaagtgtacacgttttctagaacacatagcaaggaagctgatgctaagaaattgggaactgaccattttattgcgacgtgggaggacaaagactgggccaagaagattggcagaaagctggactttatcatttcgtgtggaaattcggccacgaactttgatatggatggttacctcagtgtgctgaaggttcatggtaaactcatttccgtcggccttccagaggagccattcacgctgtctgctggaagctttatcaagaacggttgctacttgggatcgtcccacttggggaacagacaggagatgcttgatatgctgaaacttgctgctgataagggcattggttcttggtatgaggagctcccaatctctgaggaagggctgaaggaaggactggagagatgccacaacaatgacgttaagtataggttcaccctgaccggttacgataaggcattcaaatagtaaggctgagatcttcttcagtgcattgtagttgaatgaagggttaggggggaaatgcccccctattttttgtctagccatcctgccacgtttgacagggtagcaatttcgacacgatagggttctctcttctgccgtta

SEQ ID NO: 72 - DNA, 1555 bp, Artificial Sequence
  Synthetic Construct- Sequence No. 72, Example 72: designer nirA-promoter-controlled NADH-dependent Butanol Dehydrogenase DNA construct (1555 bp)
agaaaatctggcaccacacctgacccccatcgagagactccgaacgtggcaaatggagggaccagagttgttcagttcacaggtagataatgtcgcgggtcttgatagttagcaataaatacagtttcagaatatctgtaatacaaaaactgtatcgagacaagaaaaaagtagcaaaatttacaaatgttcatgattcatctggctaaattggatgttcaactgacccattgaagacaagggcaacaaccatgcagggaagcgcgcaaaatggcgagcacatcatcgcggttcaatgttttgaaacggccgaactcgccaaacgccatcgctttatcggccatcagctccaagttttcctcgccgatgccatagtccgcaagccgcgacggcgccccgaggctcgaccagaactcgcgcagccgctcgatgccttcaagcgccacatcccgctccgatttgcccgccggatcgacatcaaagacgcgcaccgcgagctgggcgaaacggctgacattttcatcgagcacatgcttcatccagttcgggaacaaaatcgccaatcccccggcgtgcgggatgtcatacacggcggaaacggcatgctcaatattgtgcgtcgcccagtcgccgcggacgcccatttgcaagaagccgtttaaggcgatcgtgcccgagtacatgatcgtctcgcgcagctcgtagttttccaaatcgttgatcagtttgggcgccgtttcgatcacggttttcaacaccgcttcacacatccggtcttgcaatggcgtgttcggcgtatggtggaaatattgctcaaacacatgcgacatcatatcgacaatgccgtaaaccgtatggtctttcggaacggtcatcgtatacgtcggatccaaaatcgaaaattgcgggaacgtaaacgggctgccccagccgtatttttctttcgtctcccagtttgtgatcaccgaaccagaattcatctccgacccggtcgccgccagcgtcaagacgacgccaaacggcagggcgccggtgacgggcgcttttttcgtgataaactcccacggatcgccatcgaatttcgccccggcggcgatcgctttcgtgcagtcgatgacgctgccgccgccaaccgccagcaaaaattcgacgccttcccgcttgcaaatgtccaccccttttcttacggtcgagacgcgcgggttcggttcgacgcctggcagttcgatgacctcggcgccaatattccccaatatcttcatgacttcctcatacaatccgtttcgtttgatgctgccgccgccatacacgagcagcactttcttgccgtagcgcggcacttcttctttgagacgttcgagctgcccttttccgaaaatcagtttcgtcgggttgcggaaaataaactcttgcattaaggctgagatcttcttcagtgcattgtagttgaatgaagggttaggggggaaatgcccccctattttttgtctagccatcctgccacgtttgacagggtagcaatttcgacacgatagggttctctcttctgccgtta

SEQ ID NO: 73 - DNA, 1558 bp, Artificial Sequence
  Synthetic Construct- Sequence No. 73, Example 73: designer nirA-promoter-controlled NADPH-dependent butanol dehydrogenase DNA construct (1558 bp)
agaaaatctggcaccacacctgacccccatcgagagactccgaacgtggcaaatggagggaccagagttgttcagttcacaggtagataatgtcgcgggtcttgatagttagcaataaatacagtttcagaatatctgtaatacaaaaactgtatcgagacaagaaaaaagtagcaaaatttacaaatgttcatgattcatctggctaaattggatgttcaactgacccattgaagacaagggcaacaaccatgaaaatccacatcactgccgtaatatgcacaagtatataatttttccatagtttcatcattaatctcccttggatttgatcctgtgcatggatctaaaacagcattatgagctataaatttaagattagctttaaattcattctcatctattccatactctttcattgatgaaggtatatttaattccttattaaacttatttattaaatctattaggtcatctgttaattctctttcactttctccctttaatccaatatgtcttgcaatgttagcatatctattttcacaagcttttctattatatttaattacatatggcaagaagatagcattagcacatccatgtggtatatggaatacagcccctaccttatgagccatagaatgtactattcctaaaagggcattagagaaggccattcctgctaaacattgagcctcatgcatttctcccctagcttccatatctcccttatatgaatttactaagtgcatattaaccatttcaattgcctttaaagctaaaggatctgtaaagtttgatcttaaacttgcagtataagcctcaatagcatgagttaaggcatccattcctgtgtgagctactaacttctctggcatagtttctgctaagctaggatcaacaatagctatatctggagttatttcaaaatctgctaaaggatatttaatcttagccttataatcagttattactgagaaggcagttacctctgtagcagttccagaagttgatggaatagctacaaactttgcttttcttctaagcttaggtaatccaaaaggaacaatggccttttcaaaagtaaaatcaggatactcgtagaaaatccacatagcctttgctgcatcaataggtgaacctcctcctatggaaactatccagtctggattaaattcctccatttcctttgcacccttcataacagtttctactgatggatctggttctactccttcaaaaacctttgtttccatattagcttcctttaaataacttaaaaccttatctaaaaagccaaatcttttcattgatccgccaccaataactataaaggcctttttaccttctaaactctttaatacttctaaggaatcttttccatgatatatgtcccttggtaaagtaaatcttgccattaaggctgagatcttcttcagtgcattgtagttgaatgaagggttaggggggaaatgcccccctattttttgtctagccatcctgccacgtttgacagggtagcaatttcgacacgatagggttctctcttctgccgtta

SEQ ID NO: 74 - DNA, 3646 bp, Artificial Sequence
  Synthetic Construct- Sequence No. 74, Example 74: designer nirA-promoter-controlled Phosphoenolpyruvate Carboxylase DNA construct (3646 bp)
agaaaatctggcaccacacctgacccccatcgagagactccgaacgtggcaaatggagggaccagagttgttcagttcacaggtagataatgtcgcgggtcttgatagttagcaataaatacagtttcagaatatctgtaatacaaaaactgtatcgagacaagaaaaaagtagcaaaatttacaaatgttcatgattcatctggctaaattggatgttcaactgacccattgaagacaagggcaacaaccatggccggcgttccgcaagcccgccgcgatgcccaggatggagagcagcagcgcccgctccagggccgggcgctcggggtcgccttccggcgaggcccggtaccgggccagcagctccacctgcaggtagctgatggggtcgacgtacgggttgcgcaaggccgtctgccgcgccagcacggggtggtgggccagaagcggcccgccgaaggtctcctccaagagcgcccgggtccgcaccatggcctcctcgagccgggggaagaaccggttcgccaggggcccgggcaccagccgcaggtactccctggccacggccaggtcggccttggccagggccagggccgcgccgtccagcaccgagcggaagaagggccagcgggcaaacatcgcctggcgaaggtcccgcggcaccgccgcaagaccttcggccagcccgtaccagccgggcagcagaagacgcacctgggtccaggccatcacccaggggatggcccgcagatcctggacgcgccgggcccggcccgtgcgggccaccgggcgggaagcgatcttcagggcggcgatctcccggatcggggtgaagtgctcgaagaactcgaagaacccgggctccgccagcagctggcggtaggcctccgccgaccgggcggcggcccggtccatggcctcccgccaggccgccgggacgggggaaccgcccggggcgagcccctggcgcccgccgcccggcctgctcggcgcggtcccggccccgccgggcgggccgggttcctccggcgaaagcaccgcctcttgggcctgggccagcgtgtcccgggccgccgccagaaggaagtggtagaggagctgctccaggttgcgcagggccagctcggggtgagcgtagcggtccgccagcgcctctccctgctcggtgagccgcaggcggcggcccacggtgcccggcggcaggctggcgatggcgcggccggcggtccccccgccgccccgggctgtggacgtgccgcgaccgtggaagaaggacaccggcacgcccgccgcccgggccaccgccgcgatgccctcctgggcccggtagagggcccagttggccgccaggtagcccgcgtccttgctggagtcggagtagccgatcatcacctcgcagccgccgcggccgcgggcgtggacgccgaagacggggttctgcagcagctgctccatggcgcggggcgccgcctccaggtcggccagggtctcgaacagggggaccacgtcaaagggcaaggggtggccggggcggtacagccccacctcccgcgccaggacgaacacctccagcacgtcggcggggccgcggcagccgctgatgatgtaagccccccggtcctgccaggcccgcagagcatccagggccacggccagctcgcggctgcggggccggtagcccaccggcgccagcggccggggcgaagccagctcccgggtcagcaccgcctcccgcccggcggcatccagggccaggtactcccctgccgccatgaccccaccggcttccagcagctccgccaccgcccgcccgtgggcctcggcatgctcccgcaggtcgaggggcgccatggcctcgccaaagacctgggcccgccagcgcaggggacgcaccagggtggccgccgcctcgcccagcccggcatcccgcagcccctcttccacctggaagagcaggcgatccagggcggtggaaccggcggcctccggcccctcgccggccggcggttccccggcggtcccctttggtggcgcggccgcggcgggccgggaaggccgttcgccggctgggtccgctggaacggcgggccctccagggatgccctccgctgaagcgggcggccggggaggcattgccgctccctccggcggagccgccggccggggaggcggtgccgttgcctcgactgcagcgtccggccggtggggtacagccggtgcctcggctggagccgccgcccgggcgggcgtctcgctccacacctcttccggcaccgcccttgccgcccagtgccgctgcagccggtaggcgaaccgccggtagggctcgccggggaaccggccggcggccgccggcggcaggggcgccacggcctctgcgggcaaggagggcaggggaggcagggaagcccgttcttccgccacggacagatcccgcgtcagggcggccaggcctccggcgtactttcgggcgatctcggcccgcgcgtaggcctgggcccaggcggtgacctccggggtcacaaaggggttgccgtcccggtcaccaccgatccagctccggaaggccaggcgcgggggaagaaccggccgccgcccgtagcgggcggccaccgccccctcgagggcctccatgagccggggcaccgcctcccacagggtggtgggcaggtagtagaggccgccgcggacctcgtcctccacccggggcggggccgggcgcagctcgcgggtggtccagagcagggtgacccgggccaccacctcgtccaggtccccctcgccccgctccagccggtccagggcctggttgagctgcagcaggtggtggcgcagggtgcgccgccgcgtctcggtcggatgggccgtgaaggtcagctccagccgggccgaggcgaggaggcgcaccacgtcgtcgaattccatcccttgggcctgaagctgggtgaccagggccagcagcgactcgggccggggccggtcgggcgtgctggcctgctcgcgccggcggttcacccgcacccggtgccgctcctccgccaggttgaccagatggaaataggtcgaaaaggcccggatcagcccttcggccgcggccaccgaaagcccgccgatctcggcccgcagcgcctgccgggcggcgtcgtcccccgggtgctgccggaggtgcttggtgtgggcgcggatgtcctcttccagttcgaacaggcgatcccccgagaggcggcggatggcctcccccagggcccgtcccaggaggtcgacctcccgcttgagaagggggtacagctcctcttccggccgcccatccggcgggggaacggatcccgccggggcaggcaacgcctcgccggacgagccggccgccgcagggcggctcccctgcccgccgccccggtcctggcggtcctgaccgtccttgcggtcccggccgtccttcaggtcccggctccccttccccgccgccgagccggcccctgccggccggtcaccctcgccgctcactaaggctgagatcttcttcagtgcattgtagttgaatgaagggttaggggggaaatgcccccctattttttgtctagccatcctgccacgtttgacagggtagcaatttcgacacgatagggttctctcttctgccgtta

SEQ ID NO: 75 - DNA, 1591 bp, Artificial Sequence
  Synthetic Construct- Sequence No. 75, Example 75: designer nirA-promoter-controlled Aspartate Aminotransferase DNA construct (1591 bp)
agaaaatctggcaccacacctgacccccatcgagagactccgaacgtggcaaatggagggaccagagttgttcagttcacaggtagataatgtcgcgggtcttgatagttagcaataaatacagtttcagaatatctgtaatacaaaaactgtatcgagacaagaaaaaagtagcaaaatttacaaatgttcatgattcatctggctaaattggatgttcaactgacccattgaagacaagggcaacaaccatgagaatttcggaaagatcaaaaaaggcgccggcgagtcccataagaaaattagtgccatttgccgaggaagctgtaaaaaaaggtaaaaaaatctattatttaaacataggtcaacctgatataccaacaccttcaatttattttcagtatgaggaaaaacacagaccccagattgtagcttatacacactcagcaggtcttctgccactgagggaggcttttacaaaatattacgccagattcgatatagatgttttcccggatgaaatcatcgttaccaatggtggaagtgaagctgtcctgttcgctatgacagtcgtggcggatccgggagatgaaatacttgttctggagccgttctatgccaattacgctggatttgctgctcaacttggtatcaatcttgttccagttagaactcgcccggaggatggatatcaaataccaaagatgggtgattttctggagaaaatcagtcacaggactaaagcaatcattttttccaatccctgcaatcctacgggggctgtttacgatgaaaaacaacttgaagttattgctgaagttgctttgaagagagatttgtttgtgatttcagacgaggtttatagagaattcacttttgatggttttagggccatatctatgatgagtttttctaatatttctgacaaagtcatagttgttgacagtatttctaaaagatatagtgcctgcggcgcgcggattggtacatttattaccaagaataaagatatatatcaagcagctatgaaactggctcaggcgagactctgtcctgctatgacatctcaatacggtactattggtcttctgacgcttgacgatttgtattattcacaaatgagaaaagagtatgaaatgagaagagatgttgtttacgaagaacttcagcgcattgatggagcagtcttcaagaaacctcacggggctttttatatttcggtgaaacttccaatcgacaattctgaagattttgtgaaatttatgttgacggagtatgaggttgaaggaaaaacgacaatggtggcacctctcagtggattttatgtaacaccatctacggggatgagtgagatcagaatagcgtatgttctggaacgcgaacaactgagggatgcagttgcaattttgacttcaggtttgaaaacttacatagagagaagaaataaataataaggctgagatcttcttcagtgcattgtagttgaatgaagggttaggggggaaatgcccccctattttttgtctagccatcctgccacgtttgacagggtagcaatttcgacacgatagggttctctcttctgccgtta

SEQ ID NO: 76 - DNA, 1588 bp, Artificial Sequence
  Synthetic Construct- Sequence No. 76, Example 76: designer nirA-promoter-controlled Aspartate Kinase DNA construct (1588 bp)
agaaaatctggcaccacacctgacccccatcgagagactccgaacgtggcaaatggagggaccagagttgttcagttcacaggtagataatgtcgcgggtcttgatagttagcaataaatacagtttcagaatatctgtaatacaaaaactgtatcgagacaagaaaaaagtagcaaaatttacaaatgttcatgattcatctggctaaattggatgttcaactgacccattgaagacaagggcaacaaccatgtagtccgaaaacttgacagagttctttcaacaaatcttctgctttatcttcatgtacaaggcatgatatctttatttcagaagttgttatcatttctggctctatgtttttctttctcaaaacttcaaaaaattttgctgcaacacctcgttgatatttcattcctaaacctattattgataccttagaaaacccccctgtgatcttaatttcacaatcaagatctctcattgccttctgtacgtcaaccgagttactttcaacaattgtgaaagatagattaatgtctcctgagttactcaccaacgatatcatatcaacgttaaagcctttttcagcgagttctctaaatacgtcggcggttgctttagaatttttcaagctataaacgctgacctttacctgatttttctctatcgtcgcgcctgtaacaacgggtcgctcaagccattccggaagttttcccatcacccacgttccctcctcatttgaaaacgaagaagcgcaataaattggtacgctgtatttttttgctatctcaacacttcgagaatgtagaaccctggcaccaagtgcggagaattccaacatttcatcgtatgtaatataagacagtttttttgcctggggaaagatcctgggatctgttgtatatatgccagcgacgtcgctgtatatttcgcagattgttccaagttttgcggcaatagcaacagcagaagtatctgatcctcctcttccaagagttgtcagttcatcgttttcgtttattccctgaaaccctgtaacaagtaaaacatcgttatgaaaagccagcgatcttaattttcggtcatctatatcttttatccttgccgaattaaaatcgctggttgtcagaatccgagcctgaaacgcattcaaagatacagctttcatacctattctgtcaaggtatatggatagcaaagcagcggatatttgttcgccacaggataacaacatatccagttctcttggattgggtttttcagacagccttcttgcaagaaaaaccaatttgtctgttgtttttcccattgcagagacaacaacgattaactttttcccattttttactgttttcactattttctcggtaatttttttgattctttctatgctggcaagcgatgagccaccatatttttgtacaacaagtttcagaaaaatcactaaggctgagatcttcttcagtgcattgtagttgaatgaagggttaggggggaaatgcccccctattttttgtctagccatcctgccacgtttgacagggtagcaatttcgacacgatagggttctctcttctgccgtta

SEQ ID NO: 77 - DNA, 1411 bp, Artificial Sequence
  Synthetic Construct- Sequence No. 77, Example 77: designer nirA-promoter-controlled Aspartate-Semialdehyde Dehydrogenase DNA construct (1411 bp)
agaaaatctggcaccacacctgacccccatcgagagactccgaacgtggcaaatggagggaccagagttgttcagttcacaggtagataatgtcgcgggtcttgatagttagcaataaatacagtttcagaatatctgtaatacaaaaactgtatcgagacaagaaaaaagtagcaaaatttacaaatgttcatgattcatctggctaaattggatgttcaactgacccattgaagacaagggcaacaaccatgtcccctgaaaatattataaatctctgcattgagaactgcacacccggcagcccctctgattgtattatgaacaagagcaacgaacccaaactgtttgttcgaatactgtttcaacctgccaacactgacactcattccaccaccaagatctctgtgaaacttcggctgcggagaatcaactcctgtcaaataaaaaacaggtttttcaggtgcggttggaagatacattcctttaagtggttgaaaatcttcaaaagctctcacaatttcacttaaagtggccttttcctgagttttgatagttatagatagcatatgaccgtcaacaacggctaccctgttgcactgtgcgaaaatatcgagattcgccgggtatatttttccatctttcaatctgccaagtattttttttgattcggtcatgattttttcttcctcattttttatgaacggcacaacattgtcaattatatccatagatggtacaccgggatatcccgcgccagagatagcctgcattgtgacaacatttgcctcttctataccgaatctatccattatgggtttaagaaccattgtaaaacctatcgttgagcaattagggttggtgattatttttccttttctcttttgagtttcggttattttcaaatgatccagattaacttcagggataattagaggtacatcctcgtccattctatggcttgcggcatttgagaaaacaatgtatcctgcgtttgcaaattcctcctcaatttcgcctgcaacatctgaaggcaaagcagaaaacacataatcacaatctatatcaggtgtgcatttttttaaaaccatatctcctgctttttcggctacaggaacattcaagcgccattgaactgcttctctgtacttttttcccgcagaattatcagaagctgccagagctgttatctcaaaaaatggatgatttgaaagcaattgaacaaatctctgtccaacaagccctgttgcaccaagaatagctaccttcattaaggctgagatcttcttcagtgcattgtagttgaatgaagggttaggggggaaatgcccccctattttttgtctagccatcctgccacgtttgacagggtagcaatttcgacacgatagggttctctcttctgccgtta

SEQ ID NO: 78 - DNA, 1684 bp, Artificial Sequence
  Synthetic Construct- Sequence No. 78, Example 78: designer nirA-promoter-controlled Homoserine Dehydrogenase DNA construct (1684 bp)
agaaaatctggcaccacacctgacccccatcgagagactccgaacgtggcaaatggagggaccagagttgttcagttcacaggtagataatgtcgcgggtcttgatagttagcaataaatacagtttcagaatatctgtaatacaaaaactgtatcgagacaagaaaaaagtagcaaaatttacaaatgttcatgattcatctggctaaattggatgttcaactgacccattgaagacaagggcaacaaccatgaactttactatcttcgccttccacccggatgacgttgcaaatctctgccactatactcatttctcccaacaccatcagggcatctcgcaggtcagattcaggaactctatgggtcactaagaccagctgggcgaactcctcgccgcttgtcttctgcagcacggtagctatgctcagctgatggctgccaaaaaccccggcgatggccgccaataccccagggcggtccttaaccagcatccgaatatagaacttgctctccactttgtcgataggaataatctccttggcttcaaaacaagtacagcccagcatgccggtggtaccatgactgaggttatggcatatctccattatgtctcccaccaccgcgctagcagtgggcatctgccctgcccctcttccaaagaacatgacttctcccaccgcgtccccgttcacgaatacggcgttgtaaaccccctttaccgcggccagagggtggtgcataggtatgaaagccgggtggacccgggcttgcacccggccgtcgatttcctgcgcgatagccaggagcttcaccacatagcccaattcataaccgtacttgatatctaaagggcttaaacgggtaattccttcaacgtaaacgttttcgaacgtaacccggctgttgaaggcgatcgaagccaggatggcaattttacgagcagcatcatagccttctacgtctgaagtaggatcagcttcagcataccccagttcctgcgcctctttcaaagccctcgaaaactctaggccttcctcgctcatcttagtaaggatgtagttggttgtcccgttaacaatccccattacttctttgattcgattggcacctagcgaatgcttcaaaggataaattaaggggatgcccccaccaacactggcttcaaaaaagaagtccaccttgttctcttcagctgcggccagcagttcctgcccgtggaccgctattaaatctttattggcagtcaccacgttcttgcctttgcgtaacgcctgcaaaataaaggttcgagccggttcgatgcctcctatgagttctacaacaacacttatatggtcatcatccagtatgtctttgatatcggcgcaaaggacgtcttcgcttaaacctagactcaaaaccttctccgggtctttttcgaggattcgcttgatcgcgactccttgtccggtacggagcgaaataacatcccggtttgaggctaaaagcttgaccacaccggatccaaccgttccacaacccaagaggccaatattaaccactaaggctgagatcttcttcagtgcattgtagttgaatgaagggttaggggggaaatgcccccctattttttgtctagccatcctgccacgtttgacagggtagcaatttcgacacgatagggttctctcttctgccgtta

SEQ ID NO: 79 - DNA, 1237 bp, Artificial Sequence
  Synthetic Construct- Sequence No. 79, Example 79: designer nirA-promoter-controlled Homoserine Kinase DNA construct (1237 bp)
agaaaatctggcaccacacctgacccccatcgagagactccgaacgtggcaaatggagggaccagagttgttcagttcacaggtagataatgtcgcgggtcttgatagttagcaataaatacagtttcagaatatctgtaatacaaaaactgtatcgagacaagaaaaaagtagcaaaatttacaaatgttcatgattcatctggctaaattggatgttcaactgacccattgaagacaagggcaacaaccatgaaggtcctggtaccggccacaacgaccaatctcggagcgggattcgacgtctttggactcgcgctggatcttttcaacgaagtggagttttctttcgatacaaaagagacaaccatagaaagtactggaaaatacgcttcggatttgaaggaccacaatctgtttttcgaagtcttcaggttctttgagagaaaaaccgggtacagagttccgccagtcaggatcaagcagacatgcaacatccctgtatcgagcggtcttggatcgagcgccgctgtgatcgtcgcggcactccacattgcgaacgaaggaacgggcagaaatctttcacgggaagatcttatgaaactcgctgtggagctggaaggacaccctgacaacgttgtacccgctttcacaggggggcttgtggtctgttatcaaaacggaagtcatcttgattttgaaaagttcgagatcgatctttctctcacatttttcgttccaaacttttcgatgtgcacgaacgagatgagaaagatccttccggagaaggtccctttcgaagatgcggtcttcaacataaagaattcatgccagttccttgcaaagatcgcagctggaaagatcaaagaggctctgaaatacgtgggagatcgacttcaccagaactacaggataaacggcaataagaagatgaaagagtttgtggaagccatcttatcaaaaaatcccgagtactggtttgtgagcggatccggtccttctgtttgttccaatataaatgactttgaagggattccctatctcaaggacgttctgaagctgagggtgaacaacagggggatgatagtttcagaatagtaaggctgagatcttcttcagtgcattgtagttgaatgaagggttaggggggaaatgcccccctattttttgtctagccatcctgccacgtttgacagggtagcaatttcgacacgatagggttctctcttctgccgtta

SEQ ID NO: 80 - DNA, 1438 bp, Artificial Sequence
  Synthetic Construct- Sequence No. 80, Example 80: a designer nirA-promoter-controlled Threonine Synthase DNA construct (1438 bp)
agaaaatctggcaccacacctgacccccatcgagagactccgaacgtggcaaatggagggaccagagttgttcagttcacaggtagataatgtcgcgggtcttgatagttagcaataaatacagtttcagaatatctgtaatacaaaaactgtatcgagacaagaaaaaagtagcaaaatttacaaatgttcatgattcatctggctaaattggatgttcaactgacccattgaagacaagggcaacaaccatgaaattgggaatactcgaaaagtacagagaatttcttcccgtaacagacaaaacccccatgctctctttgaatgaagggaacactcctctcatacccctcgtgaacatgagcagggaactcggaataaacatctacgtaaaatacgaaggggccaatccgacggggtccttcaaagacagaggaatggtcgttgccgtcgcaaaggcactggaagaaggctcgaaagccatcatgtgcgcttcaacggggaacacctccgcatccgctgccgcgtacgccgcaagggcaggaataaaggcgatcgttctgataccagaagggaagatcgcactcggaaagctggctcaggcgatgatatacggcgccgtggtgcttcaggtgagagggaatttcgacaagtgtctggaactggtcaaggagatcacatccaaatatcccatcacactcgtgaacagtatcaatccctacagactcgaaggtcagaaaacggccgcttttgagatagtcgacgagctcggagatgcaccggactaccacttcatccccgtgggaaacgcgggcaacatctccgcttactggatgggatacaaggagtattatcagcatgggttctccaccaaactgccgaagatgatgggattccaggcggaaggggccgcccccatagttcgcggtcatcccatagaaaacccggagacggtcgccactgcaataaggatcggtaaccccgcgaactgggaaaaagcggtccgggcacgcgatgaatcgggtggagacatcgacatggtgagcgacgaagaaatactgcgcgcacagagactcttggctcagaaagaagggatcttctgtgagcccgcatccgctgcatcgatagcggggcttttgaagaagcacagacagggaatcttcaggggtggagagatcgttgtgtgtaccctcacagggaacggtttgaaagatccgaacatcgtcatctcacagcttgaacccccaaggatcatagaaggaagagtagaagagattctggaggtactcgacatatgataaggctgagatcttcttcagtgcattgtagttgaatgaagggttaggggggaaatgcccccctattttttgtctagccatcctgccacgtttgacagggtagcaatttcgacacgatagggttctctcttctgccgtta

SEQ ID NO: 81 - DNA, 1600 bp, Artificial Sequence
  Synthetic Construct- Sequence No. 81, Example 81: designer nirA-promoter-controlled Threonine Ammonia-Lyase DNA construct (1600 bp)
agaaaatctggcaccacacctgacccccatcgagagactccgaacgtggcaaatggagggaccagagttgttcagttcacaggtagataatgtcgcgggtcttgatagttagcaataaatacagtttcagaatatctgtaatacaaaaactgtatcgagacaagaaaaaagtagcaaaatttacaaatgttcatgattcatctggctaaattggatgttcaactgacccattgaagacaagggcaacaaccatgttgacattagcagacattgaacaagcgcgagcgaaaatgaaaggcatcgtccatcaaacgccgcttgagcattcgcaaacgttcagccggctgtctggcaatgatgtatatatgaaactcgaaaatttgcaaaaaacgggctcgtttaaagtaagaggttcattcaataaaattatgtcgctcacggaagaagagagggcgcgcggcgtcatcgccgcttcggccggcaaccacgcccaaggggtcgcctatgcgagcggcatgcttcatattccgtgcacgatcgtcatgccaaaaggcgcgccgctcagcaaaattgaagcgacgaaaagctacggggcggaagtcgtgctgtacggcgatgtgtttgacgagtctttggaatatgcgttagagttgcagcgtgaacgggggatgacgtttgttcatccgtttgacgacttggcggtgatggccggccaagggacgatcggcttagagctgatcgagcagcttcccgacgtcgatgtcgttctttgtccagtcggcggcggcgggttgcttgcgggggtggcgcttacgttaaaacagctgaagccgtcggttgaagtgtacggcgttgagtcatcggcttgccccggcatgacggcggccatacgccataaacagcccgtctccattgccgcatcgaatacgatcgccgatgggattgccgtgaaaaagccgggcaatattacgtaccaatacattgagcaatacgtcgatggcgttgtatgcgtggaagaggcggaaatttcgcggacgatgctgtatgtgctcgagcggaacaagctgttgatcgaaggggcggcagcttgtccgctggcggcattgttgtatcaaaagctgccgtttcgcggcaaaaaagtcgccgccattttaagcggcggcaacgtcgatgtgacgctcatttcccgcatcatcgagcgggggctcgtcgaagccgggcgattcgttacgtttacaacggtcatctccgacaagccgggccagttgaacaagctgctgcgcattattgcggagcttgaggcaaacgtgatgtcgattcatcatcagcgcatcggcgccaaagtgctgccaggtcaggcggaaattcacttttcgctcgagacaaaaaacgaagaccacattcagcaaatctaccaagtgttgttgaaagaaggctacgatgtacagttttaccgatgataaggctgagatcttcttcagtgcattgtagttgaatgaagggttaggggggaaatgcccccctattttttgtctagccatcctgccacgtttgacagggtagcaatttcgacacgatagggttctctcttctgccgtta

SEQ ID NO: 82 - DNA, 2107 bp, Artificial Sequence
  Synthetic Construct- Sequence No. 82, Example 82: designer nirA-promoter-controlled Acetolactate Synthase DNA construct (2107 bp)
agaaaatctggcaccacacctgacccccatcgagagactccgaacgtggcaaatggagggaccagagttgttcagttcacaggtagataatgtcgcgggtcttgatagttagcaataaatacagtttcagaatatctgtaatacaaaaactgtatcgagacaagaaaaaagtagcaaaatttacaaatgttcatgattcatctggctaaattggatgttcaactgacccattgaagacaagggcaacaaccatgttgacaaaagcaacaaaagaacaaaaatcccttgtgaaaaacagaggggcggagcttgttgttgattgcttagtggagcaaggtgtcacacatgtatttggcattccaggtgcaaaaattgatgcggtatttgacgctttacaagataaaggacctgaaattatcgttgcccggcacgaacaaaacgcagcattcatggcccaagcagtcggccgtttaactggaaaaccgggagtcgtgttagtcacatcaggaccgggtgcctctaacttggcaacaggcctgctgacagcgaacactgaaggagaccctgtcgttgcgcttgctggaaacgtgatccgtgcagatcgtttaaaacggacacatcaatctttggataatgcggcgctattccagccgattacaaaatacagtgtagaagttcaagatgtaaaaaatataccggaagctgttacaaatgcatttaggatagcgtcagcagggcaggctggggccgcttttgtgagctttccgcaagatgttgtgaatgaagtcacaaatacgaaaaacgtgcgtgctgttgcagcgccaaaactcggtcctgcagcagatgatgcaatcagtgcggccatagcaaaaatccaaacagcaaaacttcctgtcgttttggtcggcatgaaaggcggaagaccggaagcaattaaagcggttcgcaagcttttgaaaaaggttcagcttccatttgttgaaacatatcaagctgccggtaccctttctagagatttagaggatcaatattttggccgtatcggtttgttccgcaaccagcctggcgatttactgctagagcaggcagatgttgttctgacgatcggctatgacccgattgaatatgatccgaaattctggaatatcaatggagaccggacaattatccatttagacgagattatcgctgacattgatcatgcttaccagcctgatcttgaattgatcggtgacattccgtccacgatcaatcatatcgaacacgatgctgtgaaagtggaatttgcagagcgtgagcagaaaatcctttctgatttaaaacaatatatgcatgaaggtgagcaggtgcctgcagattggaaatcagacagagcgcaccctcttgaaatcgttaaagagttgcgtaatgcagtcgatgatcatgttacagtaacttgcgatatcggttcgcacgccatttggatgtcacgttatttccgcagctacgagccgttaacattaatgatcagtaacggtatgcaaacactcggcgttgcgcttccttgggcaatcggcgcttcattggtgaaaccgggagaaaaagtggtttctgtctctggtgacggcggtttcttattctcagcaatggaattagagacagcagttcgactaaaagcaccaattgtacacattgtatggaacgacagcacatatgacatggttgcattccagcaattgaaaaaatataaccgtacatctgcggtcgatttcggaaatatcgatatcgtgaaatatgcggaaagcttcggagcaactggcttgcgcgtagaatcaccagaccagctggcagatgttctgcgtcaaggcatgaacgctgaaggtcctgtcatcatcgatgtcccggttgactacagtgataacattaatttagcaagtgacaagcttccgaaagaattcggggaactcatgaaaacgaaagctctctagtaaggctgagatcttcttcagtgcattgtagttgaatgaagggttaggggggaaatgcccccctattttttgtctagccatcctgccacgtttgacagggtagcaatttcgacacgatagggttctctcttctgccgtta

SEQ ID NO: 83 - DNA, 1405 bp, Artificial Sequence
  Synthetic Construct- Sequence No. 83, Example 83: designer nirA-promoter-controlled Ketol-Acid Reductoisomerase DNA construct (1405 bp)
agaaaatctggcaccacacctgacccccatcgagagactccgaacgtggcaaatggagggaccagagttgttcagttcacaggtagataatgtcgcgggtcttgatagttagcaataaatacagtttcagaatatctgtaatacaaaaactgtatcgagacaagaaaaaagtagcaaaatttacaaatgttcatgattcatctggctaaattggatgttcaactgacccattgaagacaagggcaacaaccatgttttacctctttaagccaaggcatcatcgccctaagttccttacctactttttctatcaggtgctcctgccctttcctccgcaaggcactgaagaccggacggcccacttggaattcgagcaagagctcccgggcaaaagttccatcctggatggcagccaaaacctttttcatctcagccctggtgttttcgtttattatgcgcggacctaccgtgaggtcgccgtactcagcggtatcactgaccgagtaccgcataaggccgataccgccttcgtatataaggtctactatgagcttaagctcgtgcaggcactcgaaataggctatctccggctggtatcctgcctctaccaaggtatcaaaaccggctttaataagttcagtgaccccgccacagagcacacattgttctccgaataggtcggtctcggtttcttctttaaaagtagtagcgatgacacctgcacgggtacagccgatacctttagcataggctaaccccgtttccaaggctttccccgtatggtcattatgtacggctatgagcccggggactcccactccttgcctgtacatacgcctgaccagatgaccaggactcttaggcgctaccatgaagacatcgacggaaggcggaggcacaatttgcccgaaatgtatgttgaacccatgagaaaatcccaacgcatcgccttcgttaaggtaaggttcgatcttttcccggtaaaccttggcctggatatcatccggcaccaaaatctggattatctgggcagctcgggccgcttcatctaccggtaaaggcgtaagcccgtcggctacaacctgattccactccgcagtggtaaaatcgtcctccggcttacgcaaccctaccaccacttcgagaccactgtcgtgaaggttctgggcctgagcgtgtccctggctgccataaccgatcacggcaatggtcttgcctttaagcaggtcaaggtttgcatcagcatcataatacatcctagccattaaggctgagatcttcttcagtgcattgtagttgaatgaagggttaggggggaaatgcccccctattttttgtctagccatcctgccacgtttgacagggtagcaatttcgacacgatagggttctctcttctgccgtta

SEQ ID NO: 84 - DNA, 2056 bp, Artificial Sequence
  Synthetic Construct- Sequence No. 84, Example 84: designer nirA-promoter-controlled Dihydroxy-Acid Dehydratase DNA construct (2056 bp)
agaaaatctggcaccacacctgacccccatcgagagactccgaacgtggcaaatggagggaccagagttgttcagttcacaggtagataatgtcgcgggtcttgatagttagcaataaatacagtttcagaatatctgtaatacaaaaactgtatcgagacaagaaaaaagtagcaaaatttacaaatgttcatgattcatctggctaaattggatgttcaactgacccattgaagacaagggcaacaaccatggggcttcctgaagattgcccccttgctcgccgactgtacgaagaatgcgtaccttctcaggtaatcgctgtccacttctttcaccagaggcgtgaactctttcattcttctttcgaactcttcgtctgagatcaagagattcagggttctcttttcaaaatctatctcgatgaggtccccgtctttcacgatacctataggaccgccttctgccgcttctggagaaacgtgacctatcacggcaccgtgcgatccacccgagaacctaccgtctgtgatgagagccacgtcctccgcaaggcccatccccacgatggcggaggtgggtgagagcatctctctcatcccgggaccgcccttcggcccttcgtagcggatcacaaccacatctccttttttgatctttccagatagaatggcttttgtcgcctcttctccgtcttcaaagacgacggccgggccaacgtggtgcatcatcttctcgggaacaccggagagtttggcaaccgctccttctggagcgaggttcccgaagaggataccgagtccgccctctttgtggtacggattatcgaagggcctgatcacatcttcattcaggatcttagcctctctgacgagatctccaatctttctcaaatagatggtcatggcgtcttccttcaaaagaccattttcctggagacgtttcatcacagcgtagataccaccagcatcgtcgagatcctggatgtggtacggaccaacgggagagatgttgcagatgtgaggaatcttcctgctgagttcgtcaaagagctttatatcgaaatctattccaaaactctcggctatcgccttcaaatgcagaactgtgttcgtggaacctcccgttgcgaggtccaccatgacagcgttcatgaaagagtccagagtgacgatatcccttggttttacatctcttttcacgagttccacaacgagcatccccgcttctttcgccattctcaacctcttcgcgtggacggccggtacagtcccattccccctcggtgcaattccgagagcttccgccagagagttcatcgtgttcgcggtgaacaatccagcacacgaaccggcaccgggacacgcgaggtcttctatcgctttgagcgtttcttcatcgacttttcccactttgtatccaccaaccgcttcgaagacggtgatgagatcgatgtctctgccgttgtagcgacctgcgagcatgggaccgccggatatcagaacggacgggatgttcaatcttcccatggccatcatcatgccgggtgtgatcttgtcgcagttggggacgaagaccaaaccatcgaaggggaaaccgcttgcaacgatctctatggagtccgctatgagttccctcgagggcaaggaaaacttcatccccctgtgatccattgctattccgtcacagatcccgatcgttggaaagacgaagggaactcccccggccattctcacaccggctttcaccgcttcaacgaccttgtcaaggtggacatggccgggaatgatctcgttccacgaggacactatgccgatgaaaggccttcgcatttcgtcgtccgttattccgagcgctttcaaaagtgatctatggggagccctttcgagacctttctttatcacatcactcctcattaaggctgagatcttcttcagtgcattgtagttgaatgaagggttaggggggaaatgcccccctattttttgtctagccatcctgccacgtttgacagggtagcaatttcgacacgatagggttctctcttctgccgtta

SEQ ID NO: 85 - DNA, 1360 bp, Artificial Sequence
  Synthetic Construct- Sequence No. 85, Example 85: designer nirA-promoter-controlled 2-Methylbutyraldehyde Reductase DNA construct (1360 bp)
agaaaatctggcaccacacctgacccccatcgagagactccgaacgtggcaaatggagggaccagagttgttcagttcacaggtagataatgtcgcgggtcttgatagttagcaataaatacagtttcagaatatctgtaatacaaaaactgtatcgagacaagaaaaaagtagcaaaatttacaaatgttcatgattcatctggctaaattggatgttcaactgacccattgaagacaagggcaacaaccatggcttctgtaaatgactactttgagaacgccaagacgacgtactttactttgagatcgggtgacaagatccccgctgttggattgggtacttggcaatcacccaccaacgagactaaagaggcagtcaagtacgctttgcagcacggttaccgtcacatcgatgctgccgccatttatggtaacgaagacgaggttggtgacggtatcaaggagagtggaatccctcgtgaccaaatctgggtcacatctaagctctggtgcaatgctcatgctcccgaggctgtccccaaggctttggagaagaccttgcgtgagctgaaacttgattaccttgacctttacctcatccactggcctatttctttgaagaccggcgatgacttggttcccaaggacaaggacggcaacaccatcactgtcgaaattcccctcgaggacacctggaaggctatggagggtcttgtgaagtccggcaaggtgaagaacattggtatttccaatttcaacaacgaagagttggatcgtattttgaaggttgccgagattcctcctgccgtccaccaaatggaaactcatccttacttgaagcagacggagttcattgagaagcacaagaagcttggcattcacgtcaccgcttactcgcctttggccaaccaaaatgctctttacggcaatgccgttcccaagttgattgagcacaagactcttgtcgacattgccaagaccaagggtgagggcgtcactggtgccaacattgctatttcttgggcagtcaagcgcggtacttcggttattcctaagtctgttcatgccaacagaattaagagcaacttcctcgttgttcccttgactgatgacgagatgaaggccatcgataacattggtgtcagcaagcgtttcaattggagcaaagttttctgcaatgagaattgtttctacggtcttgaggatggtcctcagtaataaggctgagatcttcttcagtgcattgtagttgaatgaagggttaggggggaaatgcccccctattttttgtctagccatcctgccacgtttgacagggtagcaatttcgacacgatagggttctctcttctgccgtta

SEQ ID NO: 86 - DNA, 1420 bp, Artificial Sequence
  Synthetic Construct- Sequence No. 86, Example 86: designer nirA-promoter-controlled 3-Methylbutanal Reductase DNA construct (1420 bp)
agaaaatctggcaccacacctgacccccatcgagagactccgaacgtggcaaatggagggaccagagttgttcagttcacaggtagataatgtcgcgggtcttgatagttagcaataaatacagtttcagaatatctgtaatacaaaaactgtatcgagacaagaaaaaagtagcaaaatttacaaatgttcatgattcatctggctaaattggatgttcaactgacccattgaagacaagggcaacaaccatgtcagttttcgtttcaggtgctaacgggttcattgcccaacacattgtcgatctcctgttgaaggaagactataaggtcatcggttctgccagaagtcaagaaaaggccgagaatttaacggaggcctttggtaacaacccaaaattctccatggaagttgtcccagacatatctaagctggacgcatttgaccatgttttccaaaagcacggcaaggatatcaagatagttctacatacggcctctccattctgctttgatatcactgacagtgaacgcgatttattaattcctgctgtgaacggtgttaagggaattctccactcaattaaaaaatacgccgctgattctgtagaacgtgtagttctcacctcttcttatgcagctgtgttcgatatggcaaaagaaaacgataagtctttaacatttaacgaagaatcctggaacccagctacctgggagagttgccaaagtgacccagttaacgcctactgtggttctaagaagtttgctgaaaaagcagcttgggaatttctagaggagaatagagactctgtaaaattcgaattaactgccgttaacccagtttacgtttttggtccgcaaatgtttgacaaagatgtgaaaaaacacttgaacacatcttgcgaactcgtcaacagcttgatgcatttatcaccagaggacaagataccggaactatttggtggatacattgatgttcgtgatgttgcaaaggctcatttagttgccttccaaaagagggaaacaattggtcaaagactaatcgtatcggaggccagatttactatgcaggatgttctcgatatccttaacgaagacttccctgttctaaaaggcaatattccagtggggaaaccaggttctggtgctacccataacacccttggtgctactcttgataataaaaagagtaagaaattgttaggtttcaagttcaggaacttgaaagagaccattgacgacactgcctcccaaattttaaaatttgagggcagaatataataaggctgagatcttcttcagtgcattgtagttgaatgaagggttaggggggaaatgcccccctattttttgtctagccatcctgccacgtttgacagggtagcaatttcgacacgatagggttctctcttctgccgtta

SEQ ID NO: 87 - DNA, 1540 bp, Artificial Sequence
  Synthetic Construct- Sequence No. 87, Example 87: designer nirA-promoter-controlled 3-Ketothiolase DNA construct (1540 bp)
agaaaatctggcaccacacctgacccccatcgagagactccgaacgtggcaaatggagggaccagagttgttcagttcacaggtagataatgtcgcgggtcttgatagttagcaataaatacagtttcagaatatctgtaatacaaaaactgtatcgagacaagaaaaaagtagcaaaatttacaaatgttcatgattcatctggctaaattggatgttcaactgacccattgaagacaagggcaacaaccatgcgtgaagcggtcattgtcgaagcggtcaggacgccggtcggcaagcggaacggcgtcttccgggacgttcatccggtccatttggccgcggtggtgctcgatgaagtcgtgcgccgggccggcatggacaaaggggcggtggaagacatcgtcatgggctgcgtgacgccggtcgccgaacaagggtacaacatcggccggctggcggcgcttgaggccggattcccgatcgaagtgccggcagtgcaaatcaaccgaatgtgcggctcggggcagcaggcgattcatttcgccgcccaggaaatccgctccggcgatatggatgtcacgatcgccgccggggtcgaaagcatgacgaaagtgccgattttaagcgatggcaacgagcggacgattccgccgtcgctgcatgaaaaatacgaattcatccaccaaggcgtctcggctgagcggatcgccaaaaaatacggcctaacgcgcgaggagcttgacgcctacgcgtacgaaagccatcaacgcgccttggcggccttgcgcgaagggaagtttcgcgcggaaatcgtcccggtgaaagggcttgaccgcgatggccgcgaaatccttgtcaccgatgatgaagggccgcgggccgacacatcgccggaagcgctcgccgcgctcaagccggtgtttcaagaagacggtctcatcaccgctggcaatgcgagccaaatgagcgacggggcggccgctgtgcttttgatggaacgggaggcggcgaggcggttcggactgaagccgaaagcgcgcattgtcgcgcaaacggtcgtcggctccgacccgacgtatatgctcgatggcgtcattccggcgacgaggcaagtgctgaaaaaagccggcctctcgatcgatgacatcgacctcattgaaatcaacgaagcgttcgccccggtcgtgctcgcctggcaaaaagaaatcggcgctccgcttgagaaggtgaatgtcaacggcggcgccattgcgcttggccatccgctcggcgccaccggtgcgaagctcatgacgtcgcttgttcatgaacttgaacggcgcggcggccgctatgggctattgacgatttgcatcggccacgggatggcgacggccacgatcatcgagcgggagtaataaggctgagatcttcttcagtgcattgtagttgaatgaagggttaggggggaaatgcccccctattttttgtctagccatcctgccacgtttgacagggtagcaatttcgacacgatagggttctctcttctgccgtta

SEQ ID NO: 88 - DNA, 1231 bp, Artificial Sequence
  Synthetic Construct- Sequence No. 88, Example 88: designer nirA-promoter-controlled 3-Hydroxyacyl-CoA Dehydrogenase DNA construct (1231 bp)
agaaaatctggcaccacacctgacccccatcgagagactccgaacgtggcaaatggagggaccagagttgttcagttcacaggtagataatgtcgcgggtcttgatagttagcaataaatacagtttcagaatatctgtaatacaaaaactgtatcgagacaagaaaaaagtagcaaaatttacaaatgttcatgattcatctggctaaattggatgttcaactgacccattgaagacaagggcaacaaccatgatacttaaagaaaccttctccggtcttacgccccagcttccctgcacggaccatcttaaccaagagcgggcaaggacgatacttgtcatcgccaaactcgcgatgcaaagtctgcatgatagccaaacatatatctagcccaatcatgtctgctaaagcgaggggacccataggatgccctgctccgagcttcatggaggtatccacgtcctcggggcttgcaaccccctccatgacggcatacataccttcgttcagcattggaataagcaggcggttgacaacaaagccaggagcttcgttgatctcaaccggggtcttgcccagcttaattgaaagatccttgatggtattaaaagtttcctggctagtagaagcccctttgataatctcgataagcttcattgccggtaccgggttgaagaaatgcatgcctattaccctgtctgcccgcttggttgctgctcctatctcggttatgctcagagctgatgtgttagaagccaggatacattcaggcttgcagatctcgtccagttccttgaaaatcgcttttttgatgtccatattctcgatagcagcttcaattaccacatccacatctttggccgcagccatgtcgaccgtaccgctaatcctggccatcaccgcgttcttgtcatctgcgctcatcttgcccttttcgaccattttgctgagacccttgtcgatgccttttataccattgtcaacaaactcttgtttaatatcacgtacgattacttcgaacccagcttgagcagcgacttgaacaatcccagctcccatagtacctgcgcctaaaaccattattttcattaaggctgagatcttcttcagtgcattgtagttgaatgaagggttaggggggaaatgcccccctattttttgtctagccatcctgccacgtttgacagggtagcaatttcgacacgatagggttctctcttctgccgtta

SEQ ID NO: 89 - DNA, 1162 bp, Artificial Sequence
  Synthetic Construct- Sequence No. 89, Example 89: designer nirA-promoter-controlled Enoyl-CoA Dehydratase DNA construct (1162 bp)
agaaaatctggcaccacacctgacccccatcgagagactccgaacgtggcaaatggagggaccagagttgttcagttcacaggtagataatgtcgcgggtcttgatagttagcaataaatacagtttcagaatatctgtaatacaaaaactgtatcgagacaagaaaaaagtagcaaaatttacaaatgttcatgattcatctggctaaattggatgttcaactgacccattgaagacaagggcaacaaccatgacggttcgactggaatacgatggcgggttcgcgcacctgacgctcagccgcccgcaggtcctgaatgcgctcagtttcgagctgctcgccgagttgagccgggcgcttgccggcgtcgccgaatccgatgcgcgcgccctgatcgtcacgggcgagggcgacaaggcgttctgcgccggcgcggacattcccgagctgatgaatcggccgctcatgcaagagctcgaaggggccgcgaaaggccaggcggtgttcagccggatcgccgagctgaagattccgtctgtcgccgtcatccagggttatgccttcggcggcgggctggagcttgccctggcatgcacattccgcgttgccactgatcgcgcccgcatggggctgcccgaggtcaagctcggcctgatcccgggttatggcggaacgcagcgtctgccgaggctgatcggcgaggggcgcgcactcgacctgatcatgtccggccgcacgatagacggcggggaagccgagcgaatcggcctggtcaatcgcatagacaacgaggggacgcccctggagatcggcaagcggtttctggagccttatctcaagcacagtctctgcgccttgtattttgcccgcgaggccgtgcagaggggaggcggtgtcgccattgcggatggcctgcgcatcgagcgggatctttccacgctggcttaccggagccaggatgcggccgaggggctgcgcgcttttgtggaaaaacggcccgcgtctttcaaggactgctgataaggctgagatcttcttcagtgcattgtagttgaatgaagggttaggggggaaatgcccccctattttttgtctagccatcctgccacgtttgacagggtagcaatttcgacacgatagggttctctcttctgccgtta

SEQ ID NO: 90 - DNA, 1561 bp, Artificial Sequence
  Synthetic Construct- Sequence No. 90, Example 90: designer nirA-promoter-controlled 2-Enoyl-CoA Reductase DNA construct (1561 bp)
agaaaatctggcaccacacctgacccccatcgagagactccgaacgtggcaaatggagggaccagagttgttcagttcacaggtagataatgtcgcgggtcttgatagttagcaataaatacagtttcagaatatctgtaatacaaaaactgtatcgagacaagaaaaaagtagcaaaatttacaaatgttcatgattcatctggctaaattggatgttcaactgacccattgaagacaagggcaacaaccatggccggcgcgcagcaggatcttgccgctgcgtccgggcttgtcgctggccgcggcggccttggcggcatcgtgcaggtcgaacaccgcttccaccggcagcgccaggctgccatcgagcgcggcggtgagcagttcgccgatcatgcggcgcttgtcctcggccttggtggcctgcatcaccttgctgccccagaagccacgcacggtggcctgcttgaagatcacatcgccgctggatatctgcagcggctcgccggtcatcgagccaaaggaaatcagctcgccgccttcggccagcaaggccatcagctcacccgctgcattgccggccaccgaatcgatggcgcgcacgatgggcgcatcgccggccagcgcgcgcaccttgtcctgccagcctgcttgcgcagtggagattgcgttgccgatgcccagcgctttcagctcgtccacgccggcgtcgcggcgcaccaggttgatcacgttgatgccgcgtgcggcggcgagcatcgccaccgtcttgccgaccgcaccgttggcggtgttctgcacgatccagtcgccctgtttcacctgcaggaattcgatcagcatcagcgcgctcagcggcatggcgatcaactggcaaccacgctcgtcgtccaggccatccggcaacggcaccacgccggaggcgtcggcaaggaagtactcggcccaggcctcatgcacaccggcggcgaccacgcgctggccaacctgcaagccctcgacaccctcacccagcgcatcgatgacacccgccgcttcgctgccgccgatggctggcagttccggcttgtagccgtaattgccgcgcacggtccacaggtcatggttatggatcggcgcgcgccgcatcgcaacgcgcacctggcccttgcctggctgcggcgtggggcgctcgcccagttcgagcaccttggccggatcgccgaattgggtatggatggctgcgcgcatggaggtctcctgccgggcacgctcttgctgcgacgcgcccgatcgttgtgaaaggtggcgcgatgctatcggcagggctgcaaggaagggatgaagcgaacggaactgctgtgtgaagttgttggcgtgcgcgcgtagtgacgatgctctgctgcagcgccggaggactgcgtgcaggccgaccctcattaaggctgagatcttcttcagtgcattgtagttgaatgaagggttaggggggaaatgcccccctattttttgtctagccatcctgccacgtttgacagggtagcaatttcgacacgatagggttctctcttctgccgtta

SEQ ID NO: 91 - DNA, 1747 bp, Artificial Sequence
  Synthetic Construct- Sequence No. 91, Example 91: designer nirA-promoter-controlled Acyl-CoA Reductase DNA construct (1747 bp)
agaaaatctggcaccacacctgacccccatcgagagactccgaacgtggcaaatggagggaccagagttgttcagttcacaggtagataatgtcgcgggtcttgatagttagcaataaatacagtttcagaatatctgtaatacaaaaactgtatcgagacaagaaaaaagtagcaaaatttacaaatgttcatgattcatctggctaaattggatgttcaactgacccattgaagacaagggcaacaaccatgtagttgtctactaactacgtaagtcatttcctgcaaattgtgcattccatcatgagaagttcctggataatgtgctggcatttcccctggcttagtgactatgcttacaccaagtaacgtcattttttcaataaattcgtggtcgtcaccactataccccatagtttgaaggaattgctttaaattttcttcaacataatcatgtacttcatctttattttcatatgggcaaacaaatataagtctattaaagcatctatcaatatcctttttttcaggcattctgttgcttaaaatcacagtatagtcggcattacacgatgcaaacacctttgccggtttctcctcatcaacactatattttaataaacaatactgtcggtcttgtattgatttcatagaactccaaggactcagatatgcctttgggaaaacctctgtaagctctttcaagctttctgctacagtttctgcaagaatattaatgtctatttttttattggcaaataccatcctaggagacaaacaggctttttgctcccaacatatcacatcactagcaataccttttgcaatagtcttaatatcttctactttatctataacttcaaaactaattttagcaccatgcattattaaatgagaattatattttgcacataactctgccattatccttcctgaatattctccaccccaatgtataacacaatccatttctctcacgacagtctcatatatatcagaacattcactactaaagtataaaacagatagtctatcttttatacttggatcaagctgtaccaaactttcatagaaagcatacgcaaaatatggttcatcagcagaaacctttactaaattacagttctttgataataaccccatacctatacttgtcggaacaactacaaatgcatttccagaaatattatgaaacatcacacctcttggctgtctatgcacagctccataacttgttggaacccaattatctagtatatcaatgttaccaagttcttctttaatgattatctcaagattttctcttaaaagcattctcatactattttcaagttcatatgttacaagttcttcactttgattcaatatgttagctaatctttctatatgtactttggagtatcctctatcaagccacaatcttccacacctatccaaaagatcaattgtatcctgcactgatattgcatgactcttacttttactttttctaagtctttttatttcctcaattacctgatctctacttgagtaagttaattctaattccaggccatttatattctttattaaaacattactttcacaaacagtttcgctcttcattaaggctgagatcttcttcagtgcattgtagttgaatgaagggttaggggggaaatgcccccctattttttgtctagccatcctgccacgtttgacagggtagcaatttcgacacgatagggttctctcttctgccgtta

SEQ ID NO: 92 - DNA, 1450 bp, Artificial Sequence
  Synthetic Construct- Sequence No. 92, Example 92: designer nirA-promoter-controlled Hexanol dehydronase DNA construct (1450 bp)
agaaaatctggcaccacacctgacccccatcgagagactccgaacgtggcaaatggagggaccagagttgttcagttcacaggtagataatgtcgcgggtcttgatagttagcaataaatacagtttcagaatatctgtaatacaaaaactgtatcgagacaagaaaaaagtagcaaaatttacaaatgttcatgattcatctggctaaattggatgttcaactgacccattgaagacaagggcaacaaccatggaactcgacctcgacggtcccggggttggtgaagtgctgatcaagtacaccgccgcggggttgtgccattcggacctgcacttgaccgacggggacctaccgccgcgctatccaatcgtcggggggcacgaggggtcaggcatcatcgaggacgtcggacctggggtcaccaaggtcaaaccaggcgatcacgttgtttgcagcttcatcccgaactgcggaacctgtcggtactgcgccaccggacgctccaacctctgcgatatgggcgccaccatcctcgaagggtgcatgcccgacggcagttaccggttccacagtaacggcctggatttcggtgcgatgtgcatgctcggcacattctccgaacgcgcaactatctcccagcattcggtggtcaagatcgacgactggctgccgctcgagaccgcggtggtcgtcggctgcggcgtgccgactggctggggcacctccgtctatgccggcggggttcgttgcggtgacaccaccgtcatctatggcgtcggcggcctgggagtcaacgccgtccaaggcgcggtgagtgcgggcgcgaagtacatcgtggtcgtcgatccggttgcgttcaaacgcgacaccgcgctcaagttcggcgccacccacgcgttcgccgacgccgccaccgccgcggccaaggtcgacgaactgacctggggacagggtgccgatcaggcgctgatcctggtcggcaccgtcgacgaggacgtggtctcggcggcgactgcggtgatcggtaagggaggcaccgtcgtgatcaccggactggcggacccagcaaagctcacggtgcacgtttcgggaacggacctgacgcttaacgagaagacaatcaagggcacgttgttcggctcgtccaatccgcaatacgacatcgtacggctgctccgtctctacgacgccggccagctaaaactcgacgatctgatcaccacccgatacacgctcgaccaggtcaaccagggctaccaggatctgcgagacggcaagaacatccgcggcgtgatcatccacgcctgataaggctgagatcttcttcagtgcattgtagttgaatgaagggttaggggggaaatgcccccctattttttgtctagccatcctgccacgtttgacagggtagcaatttcgacacgatagggttctctcttctgccgtta

SEQ ID NO: 93 - DNA, 1074 bp, Artificial Sequence
  Synthetic Construct- Sequence No. 93, Example 93: designer nirA-promoter-controlled Octanol Dehydrogenase DNA construct (1074 bp)
agaaaatctggcaccacacctgacccccatcgagagactccgaacgtggcaaatggagggaccagagttgttcagttcacaggtagataatgtcgcgggtcttgatagttagcaataaatacagtttcagaatatctgtaatacaaaaactgtatcgagacaagaaaaaagtagcaaaatttacaaatgttcatgattcatctggctaaattggatgttcaactgacccattgaagacaagggcaacaaccatgttgggaggccaagaagccgctggtgattgaggacattgaggtggcgccacctcaggcttggcaggttcgcatcaagattacagccactggcgtttgccacacggattctttttcgttgagcggctctgatcctgagggtctctttcccgtggtccttggccatgagggcgccggcatcgtggagagcgttggcgagggcgtaaccaactttaaggccggcgatcatgtcattgccctctacataccccagtgcaatgagtgcaaattctgcaagagcggcaagacaaatctctgccagaagattcgcctcacccagggcgctggtgtcatgcccaatggatcctcccgcttgtcgtgcaagggtcagcagctgttccatttcatgggcacctcaactttcgccgagtacgcggtggtggccgacatatcggtgaccaaaatcaacgagtcggctccattggagaaggtgtgccttctgggctgtggcatttccacgggctatggtgccgccttgaacacctttaggtggaacctggcagcacttgcgccgtctggggtctgggtgctgttggactggcagtgggtctgggctgcaagaaggctggcgccgccaaggtctacggcatcgacatcaatccctccaaattcgagctggccaggaagttcggcttcaccgactttaaggctgagatcttcttcagtgcattgtagttgaatgaagggttaggggggaaatgcccccctattttttgtctagccatcctgccacgtttgacagggtagcaatttcgacacgatagggttctctcttctgccgtta

SEQ ID NO: 94 - DNA, 1096 bp, Artificial Sequence
  Synthetic Construct- Sequence No. 94, Example 94: designer nirA-promoter-controlled Short Chain Alcohol Dehydrogenase DNA construct (1096 bp)
agaaaatctggcaccacacctgacccccatcgagagactccgaacgtggcaaatggagggaccagagttgttcagttcacaggtagataatgtcgcgggtcttgatagttagcaataaatacagtttcagaatatctgtaatacaaaaactgtatcgagacaagaaaaaagtagcaaaatttacaaatgttcatgattcatctggctaaattggatgttcaactgacccattgaagacaagggcaacaaccatgaaggttgccgtaattactggggcatcccgtggaatcggggaagctatagcaaaggcccttgctgaagatggatattcccttgccttaggggctagaagtgttgataggttagagaagattgccaaggaactcagcgaaaaacatggggtggaggtattttacgactacctcgatgtatcaaaaccagaaagcgttgaagagtttgcaaggaaaacgctagctcactttggagatgtggacgttgttgtggccaatgcggggcttggttactttggtaggcttgaagagcttacagaagagcagttccacgaaatgattgaagtaaaccttttgggagtttggagaacaataaaagctttcttaaactccttaaagcggactggaggagtggctattgttgttacttcagatgtttctgcaaggctacttccatacggtggaggttatgtggcaactaaatgggctgcaagagcattggtaaggaccttccagattgagaatccagatgtgaggttcttcgagctaagacctggagcagtagatacatattttggagggagcaaagctgggaagccaaaggagcaagggtatttaaaacctgaggaagttgctgaggcagtaaaatacctcctaagacttccaaaggatgttagggttgaggaattaatgttgcgctcaatttatcaaaaacctgagtattgataaggctgagatcttcttcagtgcattgtagttgaatgaagggttaggggggaaatgcccccctattttttgtctagccatcctgccacgtttgacagggtagcaatttcgacacgatagggttctctcttctgccgtta

SEQ ID NO: 95 - DNA, 1438 bp, Artificial Sequence
  Synthetic Construct- Sequence No. 95, Example 95: designer Synechococcus sp. strain PCC 7942 nirA-promoter-controlled NADPH-dependent Glyceraldehyde-3-Phosphate-Dehydrogenase DNA construct (1438 bp)
agaaaatctggcaccacacccttcttgcagaacatgcatgatttacaaaaagttgtagtttctgttaccaattgcgaatcgagaactgcctaatctgccgagtatatgatgtcaacgaatattgcaattaatggaatgggtagaattggaagaatggtgctaagaatagcactaaagaatgaagcattgaatgtagttgccatcaatgctagctatcctcctgaaacaattgcacatttaattaattatgacacaacacatgggagatacgataaaagagtagaacctattgaaagtggaattcgagtggaaggccatgatattaaattagtgtctgatagaaacccagaaaatttaccctggaaagatttagaaatagatatcgtcattgaagcgaccggtaaatttaaccatggtgataaagctaaggcacatattcaagcaggagctaaaaaagtgttattgacaggaccatcaaaaggcggaaaagtacagatggtggttaaaggtgttaacgatcaagacttagatacagatacatatgacatatttagtaatgcgtcgtgtactacgaattgtatcggaccagttgcaaaagttttaaatgatagttttggcattgaaaatggcttaatgacaacggtacatgcaattacaaatgatcaaaataatatagataatccgcataaagatttgagaagagcgcgttcttgtggggaaagtattataccaacatcaacaggtgctgctaaagcattaaaagaagttatgccagaattgaatggcaaactacatggcatagcacttcgtgtgccaactcaaaatgtatcattagttgatttagtcattgatttaaaacaaaaagtgacagtagatgaagttaatcatgcatttagagatgcaaacttacaaggaattattgatgttgaagaggcccctctagtttctaaggactataatacaaatcctcattcagcagttatagatgctaaaaatacaatggtcatgggagataataaggttaaagttatagcctggtatgataacgaatggggatattctaatagagtagttgaggtagcaaatcaacttggagaactaattaaataataatagtgatcccggccgctactaaagcctgatttgtcttgatagctgctcctgcctttgggcaggggcttttttctgtctgccattcttgaggatggcggactctttcccttttgctctacgcccatgaatgcgatcgcagtctcccctgtccagcacgttggagtgattggtggtggccagttagcttggatgctggcaccagcagcgcaacagttggggatgtcgctgcacgttcaaacacccaatgatcacgacccagcagtagcgatcgcggatcaaaccgtattagcagcagttgctgacgcggttctctcttctgccgtta

SEQ ID NO: 96 - DNA, 1447 bp, Artificial Sequence
  Synthetic Construct- Sequence No. 96, Example 96: designer Synechococcus sp. strain PCC 7942 nirA-promoter-controlled NAD-dependent Glyceraldehyde-3-Phosphate-Dehydrogenase DNA construct (1447 bp)
agaaaatctggcaccacacccttcttgcagaacatgcatgatttacaaaaagttgtagtttctgttaccaattgcgaatcgagaactgcctaatctgccgagtatatgatggcagtaaaagtagcaattaatggttttggtagaattggtcgtttagcattcagaagaattcaagaagtagaaggtcttgaagttgtagcagtaaacgacttaacagatgacgacatgttagcgcatttattaaaatatgacactatgcaaggtcgtttcacaggtgaagtagaggtagttgatggtggtttccgcgtaaatggtaaagaagttaaatcattcagtgaaccagatgcaagcaaattaccttggaaagacttaaatatcgatgtagtgttagaatgtactggtttctacactgataaagataaagcacaagctcatattgaagcaggcgctaaaaaagtattaatctcagcaccagctactggtgacttaaaaacaatcgtattcaacactaaccaccaagagttagacggttctgaaacagttgtttcaggtgcttcatgtactacaaactcattagcaccagttgctaaagttttaaacgatgactttggtttagttgaaggtttaatgactacaattcacgcttacacaggtgatcaaaatacacaagacgcacctcacagaaaaggtgacaaacgtcgtgctcgtgcagcggcagaaaacatcatccctaactcaacaggtgctgctaaagctatcggtaaagttattcctgaaatcgatggtaaattagatggtggtgcacaacgtgttcctgtagctacaggttcattaactgaattaacagtagtattagaaaaacaagacgtaacagttgaacaagttaacgaagctatgaaaaatgcttcaaacgaatcattcggttacactgaagacgaaatcgtttcttcagacgttgtaggtatgacttacggttcattattcgacgctacacaaactcgtgtaatgtcagttggcgaccgtcaattagttaaagttgcagcttggtatgataacgaaatgtcatatactgcacaattagttcgtacattagcatacttagctgaactttctaaataataatagtgatcccggccgctactaaagcctgatttgtcttgatagctgctcctgcctttgggcaggggcttttttctgtctgccattcttgaggatggcggactctttcccttttgctctacgcccatgaatgcgatcgcagtctcccctgtccagcacgttggagtgattggtggtggccagttagcttggatgctggcaccagcagcgcaacagttggggatgtcgctgcacgttcaaacacccaatgatcacgacccagcagtagcgatcgcggatcaaaccgtattagcagcagttgctgacgcggttctctcttctgccgtta

SEQ ID NO: 97 - DNA, 2080 bp, Artificial Sequence
  Synthetic Construct- Sequence No. 97, Example 97: designer Synechococcus sp. strain PCC 7942 nirA-promoter-controlled 2-Keto Acid Decarboxylase DNA construct (2080 bp)
agaaaatctggcaccacacccttcttgcagaacatgcatgatttacaaaaagttgtagtttctgttaccaattgcgaatcgagaactgcctaatctgccgagtatatgatgtatacagtaggagattacctgttagaccgattacacgagttgggaattgaagaaatttttggagttcctggtgactataacttacaatttttagatcaaattatttcacgcgaagatatgaaatggattggaaatgctaatgaattaaatgcttcttatatggctgatggttatgctcgtactaaaaaagctgccgcatttctcaccacatttggagtcggcgaattgagtgcgatcaatggactggcaggaagttatgccgaaaatttaccagtagtagaaattgttggttcaccaacttcaaaagtacaaaatgacggaaaatttgtccatcatacactagcagatggtgattttaaacactttatgaagatgcatgaacctgttacagcagcgcggactttactgacagcagaaaatgccacatatgaaattgaccgagtactttctcaattactaaaagaaagaaaaccagtctatattaacttaccagtcgatgttgctgcagcaaaagcagagaagcctgcattatctttagaaaaagaaagctctacaacaaatacaactgaacaagtgattttgagtaagattgaagaaagtttgaaaaatgcccaaaaaccagtagtgattgcaggacacgaagtaattagttttggtttagaaaaaacggtaactcagtttgtttcagaaacaaaactaccgattacgacactaaattttggtaaaagtgctgttgatgaatctttgccctcatttttaggaatatataacgggaaactttcagaaatcagtcttaaaaattttgtggagtccgcagactttatcctaatgcttggagtgaagcttacggactcctcaacaggtgcattcacacatcatttagatgaaaataaaatgatttcactaaacatagatgaaggaataattttcaataaagtggtagaagattttgattttagagcagtggtttcttctttatcagaattaaaaggaatagaatatgaaggacaatatattgataagcaatatgaagaatttattccatcaagtgctcccttatcacaagaccgtctatggcaggcagttgaaagtttgactcaaagcaatgaaacaatcgttgctgaacaaggaacctcattttttggagcttcaacaattttcttaaaatcaaatagtcgttttattggacaacctttatggggttctattggatatacttttccagcggctttaggaagccaaattgcggataaagagagcagacaccttttatttattggtgatggttcacttcaacttaccgtacaagaattaggactatcaatcagagaaaaactcaatccaatttgttttatcataaataatgatggttatacagttgaaagagaaatccacggacctactcaaagttataacgacattccaatgtggaattactcgaaattaccagaaacatttggagcaacagaagatcgtgtagtatcaaaaattgttagaacagagaatgaatttgtgtctgtcatgaaagaagcccaagcagatgtcaatagaatgtattggatagaactagttttggaaaaagaagatgcgccaaaattactgaaaaaaatgggtaaattatttgctgagcaaaataaatagtaatagtgatcccggccgctactaaagcctgatttgtcttgatagctgctcctgcctttgggcaggggcttttttctgtctgccattcttgaggatggcggactctttcccttttgctctacgcccatgaatgcgatcgcagtctcccctgtccagcacgttggagtgattggtggtggccagttagcttggatgctggcaccagcagcgcaacagttggggatgtcgctgcacgttcaaacacccaatgatcacgacccagcagtagcgatcgcggatcaaaccgtattagcagcagttgctgacgcggttctctcttctgccgtta

SEQ ID NO: 98 - DNA, 1603 bp, Artificial Sequence
  Synthetic Construct- Sequence No. 98, Example 98: designer Synechococcus sp. strain PCC 7942 nirA-promoter-controlled NADH-dependent Butanol Dehydrogenase DNA construct (1603 bp)
agaaaatctggcaccacacccttcttgcagaacatgcatgatttacaaaaagttgtagtttctgttaccaattgcgaatcgagaactgcctaatctgccgagtatatgatgtcaagatttacactaccaagagatatttatttcggagaaaacactttagaaactttaaaaactttaaaaggtaagaaagctataattgttgttggaggaggatcaatgaaaaaatttggtttccttcaaaaagttgaagaatatctaaaagaagcaggaatggaaataaaattaatagaaggtgttgaaccagatccatcagttgaaaccgttatgaaaggtgcagaaatcatgagagattttgagcctgattggatagtatccataggtggaggatcaccaatagatgctgctaaagctatgtggatattctatgaatacccagaatttacttttgagcaagctgttgttccttttggaataccagatttaagacaaaaagctaaatttgttgctataccatctacaagtggaacagctacagaagttactgctttttcagttataactgattacaaagctaagataaaatatcctttagctgattttaatttaacaccagatgtagctattatagatccagctcttgctcaaacaatgcctgcaaaattaacagctcatacaggtatggatgctttaactcatgcaatagaagcttatgtagcaggattaagatcatatttctcagatcctcttgcaatgcaagctatagttatgacaaaagataatttaataaaatcctatgaaggagataaagaagcaagagatgaaatgcatatagctcaatgtttagcaggaatggcattctcaaatgcgctacttggaattactcatagtatggcacataagacaggagcagtattccacattcctcatggttgtgcaaatgctatattccttccttatgtaatagattttaataagaaaacatgtaaagatagatatgcaactatagctaaaactttaggtttagcaggaaatactgatgatgaattagtagatgcattaacttctatgatacaagaaatgaataagaaaatggatataccactaaacttaaaagaatatggagtaacagaagaagattttaatgaaaacttagatttcatagcacataatgcagtgttagatgcatgtactggatcaaatccaagacctataactgaagaagaaatgaaaaaagtattcaaatgcacatttactggagagaaagttaatttttaataatagtgatcccggccgctactaaagcctgatttgtcttgatagctgctcctgcctttgggcaggggcttttttctgtctgccattcttgaggatggcggactctttcccttttgctctacgcccatgaatgcgatcgcagtctcccctgtccagcacgttggagtgattggtggtggccagttagcttggatgctggcaccagcagcgcaacagttggggatgtcgctgcacgttcaaacacccaatgatcacgacccagcagtagcgatcgcggatcaaaccgtattagcagcagttgctgacgcggttctctcttctgccgtta

SEQ ID NO: 99 - DNA, 1654 bp, Artificial Sequence
  Synthetic Construct- Sequence No. 99, Example 99: designer Synechococcus sp. strain PCC 7942 nirA-promoter-controlled NADPH-dependent Butanol Dehydrogenase DNA construct (1654 bp)
agaaaatctggcaccacacccttcttgcagaacatgcatgatttacaaaaagttgtagtttctgttaccaattgcgaatcgagaactgcctaatctgccgagtatatgctagaaatcaacttctgtatcgtaataacagcacttaagcagtttttccatttcttctacgcttggctgtcttgggttagaacctgtgcaggcatcgcctatggcattaactgcaatgtcatgtaacctctccaggaatacattttcaggcacaaatccctgtgcaaccggatagctgtctgcaccgtaatttttaatgcagtgcggtatattaagttcatcattcatcttacggagataaccgattaatgaagctaccttttcatcaaggtctgctccgccaagtcccatgaaatcagcaatttcaccataacgcttcttagcctgttcatcctttgcgttaaatgcaattaccttagggagatacattgcattcgcagcaccgtgaatgatgtgtgcgccgtaatcggcaaatgccgcacctgttttatgcgccattgaatgtacaataccaagaagtgcattagaaaatgccattcctgcgagacattgtgcattatgcattgaatctcttttttccatatcaccgttatatgaaccgacaaggtctctttgaatcattttaattgcatggagtgccaatgggtctgtaaaatcacaatttgcggtggatacatatgcctcgatagcatgtgtcattgcatccatacctgtatgtgccaccaatttttgtggcatggtctctgccagttcagggtctactattgcaacatcaggtgttatttcaaaatcggctattggatattttattcctttttcataatctgtaataattgaaaaagcagttacctcggtagcggttcctgaagtagaagatattgcacaaaaatgtgcttttttacgaagtgaaggtatgccaaatactttacacatatcctcaaaggtaatatcaggatattcatatttaatccacattgctttagccgcatcaatcggagaacctccgcctattgcaacaatccagtcaggttcaaactctgacatcgctttggcacctttcataacggtttccaccgaagggtcaggttcaattccttcaaaaagtctgacttccataccggcttccttaagatactgttctgccctgtcaaggaaaccaaaacgtttcattgaacctccgccaacacaaatcatggcttttttgccttgaaatgtcttaagtgcctctaatgcaccctttccatgatacaaatctcttggtaacgtaaatcttgccattaatagtgatcccggccgctactaaagcctgatttgtcttgatagctgctcctgcctttgggcaggggcttttttctgtctgccattcttgaggatggcggactctttcccttttgctctacgcccatgaatgcgatcgcagtctcccctgtccagcacgttggagtgattggtggtggccagttagcttggatgctggcaccagcagcgcaacagttggggatgtcgctgcacgttcaaacacccaatgatcacgacccagcagtagcgatcgcggatcaaaccgtattagcagcagttgctgacgcggttctctcttctgccgtta

SEQ ID NO: 100 - DNA, 1440 bp, Artificial Sequence
  Synthetic Construct- Sequence No. 100, Example 100: designer Synechocystis sp. PCC 6803 nirA-promoter-controlled NAD-dependent Glyceraldehyde-3-Phosphate Dehydrogenase DNA construct (1440 bp)
atggtagttaaagttggtattaacggtttcggtcgtatcggacgtcttgcattccgccgtattcaaaatatcgaaggtgttgaagtaactcgtatcaacgaccttacagatccaaatatgcttgcacacttgttgaaatacgatacaactcaaggtcgttttgatggaacagttgaagttaaagaaggtggatttgaagtaaacggaaacttcattaaagtttctgctgaacgtgatccagaaaacatcgactgggcaactgatggggttgaaatcgttcttgaagcaactggtttctttgctaaaaaagaagcagctgaaaaacacttacatgctaacggtgctaaaaaagttgttatcacagctcctggtggaaacgatgttaaaacagttgttttcaacactaaccacgacattcttgacggtactgaaacagttatctcaggtgcttcatgtactacaaactgtttagctcctatggctaaagctcttcacgatgcattcggtattcaaaaaggtcttatgactacaatccacgcttacactggtgaccaaatgatccttgacggaccacaccgtggtggtgaccttcgtcgtgcacgcgctggtgctgcaaatatcgttcctaactcaactggtgctgctaaagctatcggtcttgttatcccagaacttaacggtaaacttgacggtgctgcacaacgtgttcctgttccaactggatcagtaactgagttggttgtaactcttgacaaaaacgtttctgttgacgaaatcaacgctgctatgaaagctgcttcaaacgatagcttcggttacactgaagatccaatcgtttcttcagatatcgtaggcgtatcatacggttcattgtttgacgcaactcaaactaaagtaatggaagttgacggatcccaattggttaaagttgtatcatggtatgacaacgaaatgtcttacactgctcaacttgtacgtactcttgagtacttcgcaaaaattgctaaataatagtaatgagttacagttttggcaattactaaaaaactgacttcaattcaatgttagcccgctcccgcgggttttttgttgctttttcacagtgactataggtaatcagcaacacaatacggccctgttctttggacagtttttgtataatgttgaccgcatcctgaccggattttttatctaagtggggaattgtcaattgtcaattaaagctaagttctactaatgttttagaaggcattgtcgattgaaaataagggttgaatggagaaaattttgagcctttgtcaaagataaaaatttatttcaacagttttttaactagccgaaccagagaatgacccagtggcgctgactttgctcccgagtttttgttagaaattaccctcaagaagtaatctaataataaggttctctcttctgccgtta

SEQ ID NO: 101 - DNA, 2182 bp, Artificial Sequence
  Synthetic Construct- Sequence No. 101, Example 101: designer Synechocystis sp. PCC 6803 nirA-promoter-controlled 2-Keto Acid Decarboxylase dehydrogenase DNA construct (2182 bp)
agaaaatctggcaccacaccctaaatgcgtaaactgcatatgccttggctgagtgtaatttacgttacaaattttaacgaaacgggaaccctatattgatctctacatgatgtatacagtaggagattacctgttagaccgattacacgagttgggaattgaagaaatttttggagttcctggtgactataacttacaatttttagatcaaattatttcacgcgaagatatgaaatggattggaaatgctaatgaattaaatgcttcttatatggctgatggttatgctcgtactaaaaaagctgccgcatttctcaccacatttggagtcggcgaattgagtgcgatcaatggactggcaggaagttatgccgaaaatttaccagtagtagaaattgttggttcaccaacttcaaaagtacaaaatgacggaaaatttgtccatcatacactagcagatggtgattttaaacactttatgaagatgcatgaacctgttacagcagcgcggactttactgacagcagaaaatgccacatatgaaattgaccgagtactttctcaattactaaaagaaagaaaaccagtctatattaacttaccagtcgatgttgctgcagcaaaagcagagaagcctgcattatctttagaaaaagaaagctctacaacaaatacaactgaacaagtgattttgagtaagattgaagaaagtttgaaaaatgcccaaaaaccagtagtgattgcaggacacgaagtaattagttttggtttagaaaaaacggtaactcagtttgtttcagaaacaaaactaccgattacgacactaaattttggtaaaagtgctgttgatgaatctttgccctcatttttaggaatatataacgggaaactttcagaaatcagtcttaaaaattttgtggagtccgcagactttatcctaatgcttggagtgaagcttacggactcctcaacaggtgcattcacacatcatttagatgaaaataaaatgatttcactaaacatagatgaaggaataattttcaataaagtggtagaagattttgattttagagcagtggtttcttctttatcagaattaaaaggaatagaatatgaaggacaatatattgataagcaatatgaagaatttattccatcaagtgctcccttatcacaagaccgtctatggcaggcagttgaaagtttgactcaaagcaatgaaacaatcgttgctgaacaaggaacctcattttttggagcttcaacaattttcttaaaatcaaatagtcgttttattggacaacctttatggggttctattggatatacttttccagcggctttaggaagccaaattgcggataaagagagcagacaccttttatttattggtgatggttcacttcaacttaccgtacaagaattaggactatcaatcagagaaaaactcaatccaatttgttttatcataaataatgatggttatacagttgaaagagaaatccacggacctactcaaagttataacgacattccaatgtggaattactcgaaattaccagaaacatttggagcaacagaagatcgtgtagtatcaaaaattgttagaacagagaatgaatttgtgtctgtcatgaaagaagcccaagcagatgtcaatagaatgtattggatagaactagttttggaaaaagaagatgcgccaaaattactgaaaaaaatgggtaaattatttgctgagcaaaataaatagtagtaatgagttacagttttggcaattactaaaaaactgacttcaattcaatgttagcccgctcccgcgggttttttgttgctttttcacagtgactataggtaatcagcaacacaatacggccctgttctttggacagtttttgtataatgttgaccgcatcctgaccggattttttatctaagtggggaattgtcaattgtcaattaaagctaagttctactaatgttttagaaggcattgtcgattgaaaataagggttgaatggagaaaattttgagcctttgtcaaagataaaaatttatttcaacagttttttaactagccgaaccagagaatgacccagtggcgctgactttgctcccgagtttttgttagaaattaccctcaagaagtaatctaataataaggttctctcttctgccgtta

SEQ ID NO: 102 - DNA, 1705 bp, Artificial Sequence
  Synthetic Construct- Sequence No. 102, Example 102: designer Synechocystis sp. PCC 6803 nirA-promoter-controlled NADH-dependent Butanol Dehydrogenase DNA construct (1705 bp)
agaaaatctggcaccacaccctaaatgcgtaaactgcatatgccttggctgagtgtaatttacgttacaaattttaacgaaacgggaaccctatattgatctctacatgatgtcaagatttacactaccaagagatatttatttcggagaaaacactttagaaactttaaaaactttaaaaggtaagaaagctataattgttgttggaggaggatcaatgaaaaaatttggtttccttcaaaaagttgaagaatatctaaaagaagcaggaatggaaataaaattaatagaaggtgttgaaccagatccatcagttgaaaccgttatgaaaggtgcagaaatcatgagagattttgagcctgattggatagtatccataggtggaggatcaccaatagatgctgctaaagctatgtggatattctatgaatacccagaatttacttttgagcaagctgttgttccttttggaataccagatttaagacaaaaagctaaatttgttgctataccatctacaagtggaacagctacagaagttactgctttttcagttataactgattacaaagctaagataaaatatcctttagctgattttaatttaacaccagatgtagctattatagatccagctcttgctcaaacaatgcctgcaaaattaacagctcatacaggtatggatgctttaactcatgcaatagaagcttatgtagcaggattaagatcatatttctcagatcctcttgcaatgcaagctatagttatgacaaaagataatttaataaaatcctatgaaggagataaagaagcaagagatgaaatgcatatagctcaatgtttagcaggaatggcattctcaaatgcgctacttggaattactcatagtatggcacataagacaggagcagtattccacattcctcatggttgtgcaaatgctatattccttccttatgtaatagattttaataagaaaacatgtaaagatagatatgcaactatagctaaaactttaggtttagcaggaaatactgatgatgaattagtagatgcattaacttctatgatacaagaaatgaataagaaaatggatataccactaaacttaaaagaatatggagtaacagaagaagattttaatgaaaacttagatttcatagcacataatgcagtgttagatgcatgtactggatcaaatccaagacctataactgaagaagaaatgaaaaaagtattcaaatgcacatttactggagagaaagttaatttttaatagtaatgagttacagttttggcaattactaaaaaactgacttcaattcaatgttagcccgctcccgcgggttttttgttgctttttcacagtgactataggtaatcagcaacacaatacggccctgttctttggacagtttttgtataatgttgaccgcatcctgaccggattttttatctaagtggggaattgtcaattgtcaattaaagctaagttctactaatgttttagaaggcattgtcgattgaaaataagggttgaatggagaaaattttgagcctttgtcaaagataaaaatttatttcaacagttttttaactagccgaaccagagaatgacccagtggcgctgactttgctcccgagtttttgttagaaattaccctcaagaagtaatctaataataaggttctctcttctgccgtta

SEQ ID NO: 103 - DNA, 1756 bp, Artificial Sequence
  Synthetic Construct- Sequence No. 103, Example 103: designer Synechocystis sp. PCC 6803 nirA-promoter-controlled NADPH-dependent Butanol Dehydrogenase DNA construct (1756 bp)
agaaaatctggcaccacaccctaaatgcgtaaactgcatatgccttggctgagtgtaatttacgttacaaattttaacgaaacgggaaccctatattgatctctacatgctagaaatcaacttctgtatcgtaataacagcacttaagcagtttttccatttcttctacgcttggctgtcttgggttagaacctgtgcaggcatcgcctatggcattaactgcaatgtcatgtaacctctccaggaatacattttcaggcacaaatccctgtgcaaccggatagctgtctgcaccgtaatttttaatgcagtgcggtatattaagttcatcattcatcttacggagataaccgattaatgaagctaccttttcatcaaggtctgctccgccaagtcccatgaaatcagcaatttcaccataacgcttcttagcctgttcatcctttgcgttaaatgcaattaccttagggagatacattgcattcgcagcaccgtgaatgatgtgtgcgccgtaatcggcaaatgccgcacctgttttatgcgccattgaatgtacaataccaagaagtgcattagaaaatgccattcctgcgagacattgtgcattatgcattgaatctcttttttccatatcaccgttatatgaaccgacaaggtctctttgaatcattttaattgcatggagtgccaatgggtctgtaaaatcacaatttgcggtggatacatatgcctcgatagcatgtgtcattgcatccatacctgtatgtgccaccaatttttgtggcatggtctctgccagttcagggtctactattgcaacatcaggtgttatttcaaaatcggctattggatattttattcctttttcataatctgtaataattgaaaaagcagttacctcggtagcggttcctgaagtagaagatattgcacaaaaatgtgcttttttacgaagtgaaggtatgccaaatactttacacatatcctcaaaggtaatatcaggatattcatatttaatccacattgctttagccgcatcaatcggagaacctccgcctattgcaacaatccagtcaggttcaaactctgacatcgctttggcacctttcataacggtttccaccgaagggtcaggttcaattccttcaaaaagtctgacttccataccggcttccttaagatactgttctgccctgtcaaggaaaccaaaacgtttcattgaacctccgccaacacaaatcatggcttttttgccttgaaatgtcttaagtgcctctaatgcaccctttccatgatacaaatctcttggtaacgtaaatcttgccattagtaatgagttacagttttggcaattactaaaaaactgacttcaattcaatgttagcccgctcccgcgggttttttgttgctttttcacagtgactataggtaatcagcaacacaatacggccctgttctttggacagtttttgtataatgttgaccgcatcctgaccggattttttatctaagtggggaattgtcaattgtcaattaaagctaagttctactaatgttttagaaggcattgtcgattgaaaataagggttgaatggagaaaattttgagcctttgtcaaagataaaaatttatttcaacagttttttaactagccgaaccagagaatgacccagtggcgctgactttgctcccgagtttttgttagaaattaccctcaagaagtaatctaataataaggttctctcttctgccgtta

SEQ ID NO: 104 - DNA, 1655 bp, Artificial Sequence
  Synthetic Construct- Sequence No. 104, Example 104:  designer Anabaena PCC 7120 hox-promoter-controlled NAD-dependent Glyceraldehyde-3-Phosphate Dehydrogenase DNA construct (1655 bp)
agaaaatctggcaccacaccgcagaaatataggggctaggagttgagggtactctggttcgtcaagcatttgggatgatttcccctcacaagttcctcaaattattctcctataaacaatagatataaggtcaaaacttgagttatgagtgctgagtaaaaaattactctccacgcctcagaggtagatatgatggtagttaaagttggtattaacggtttcggtcgtatcggacgtcttgcattccgccgtattcaaaatatcgaaggtgttgaagtaactcgtatcaacgaccttacagatccaaatatgcttgcacacttgttgaaatacgatacaactcaaggtcgttttgatggaacagttgaagttaaagaaggtggatttgaagtaaacggaaacttcattaaagtttctgctgaacgtgatccagaaaacatcgactgggcaactgatggggttgaaatcgttcttgaagcaactggtttctttgctaaaaaagaagcagctgaaaaacacttacatgctaacggtgctaaaaaagttgttatcacagctcctggtggaaacgatgttaaaacagttgttttcaacactaaccacgacattcttgacggtactgaaacagttatctcaggtgcttcatgtactacaaactgtttagctcctatggctaaagctcttcacgatgcattcggtattcaaaaaggtcttatgactacaatccacgcttacactggtgaccaaatgatccttgacggaccacaccgtggtggtgaccttcgtcgtgcacgcgctggtgctgcaaatatcgttcctaactcaactggtgctgctaaagctatcggtcttgttatcccagaacttaacggtaaacttgacggtgctgcacaacgtgttcctgttccaactggatcagtaactgagttggttgtaactcttgacaaaaacgtttctgttgacgaaatcaacgctgctatgaaagctgcttcaaacgatagcttcggttacactgaagatccaatcgtttcttcagatatcgtaggcgtatcatacggttcattgtttgacgcaactcaaactaaagtaatggaagttgacggatcccaattggttaaagttgtatcatggtatgacaacgaaatgtcttacactgctcaacttgtacgtactcttgagtacttcgcaaaaattgctaaataatgaagtaagtaggaagcagggagcaggggaaagaaaattgacaactgtacaagattaatcgcgtctctgagcaatgaccaaatacatctacctccacggttttcttccagccccctatctgcgaaagcacaagatattagcaagcgtttcgcccaaattcacatacagctaacaatccctgatctcaatgctggtgaattttctcagttaacaatcacgcgccaaattcaacaagttgccgcaattttccctgataattctgaaccaataacgctgataggttctagtttaggcggtttaactgctgcttatctaggacagcgatatttacaagtacaacgcttagttttattagcgccagtttggttttttatcccattggttgcccaaaatgggtgaagaagctgtcacaagttggcaacaaacgatataggttctctcttctgccgtta

SEQ ID NO: 105 - DNA, 2303 bp, Artificial Sequence
  Synthetic Construct- Sequence No. 105, Example 105: designer Anabaena PCC 7120 hox-promoter-controlled Acetolactate Synthase DNA construct (2303 bp)
agaaaatctggcaccacaccgcagaaatataggggctaggagttgagggtactctggttcgtcaagcatttgggatgatttcccctcacaagttcctcaaattattctcctataaacaatagatataaggtcaaaacttgagttatgagtgctgagtaaaaaattactctccacgcctcagaggtagatatgctaaggggtgcagctgagctccccaagacgttggttaaagcgcagattttcactatagtccacagggacatcaatgagagtgggaacattctgtgccaaggcggttttgagggttgggataaagtcagtggtctcctcaatgcgatagcctttgagtcccatgctttcggctaacttgacaaaatcgggattactaaagtggacataggcagattcaccaaagtagcgctgctgcttccactcaatgagaccatagccgccgtcattaaagatgatggtggtaaagtttgtccccatacgcagggcagtttccagttcttggaaattcatcatgaagccaccatcccccgtgactgccaccacatgccgctgcggatagactaatttggcggccattgcccccggtaccgcaatccccattgccgcaaagccattggaaatcaagcaggtgttggggcgatcgcagtggtagtgacgagcaatccacattttatgggcacccacatcagaaataacaatgtcctcgggccccatgacttggcgcaggtcatagattagcttttggggcttaaccggaaaactctcatcctgggcatattggtaatagtccgccacaatctcctgacgcagttgcacggcatagggggtgggcttatcttggcgatcggcccgcttaagaatttcatagagggagtcagaaatatcgccgacaacctcaacgacagggatatagctgctgtcaatttccgcaggagtggccgcaatatggataatcggcaagcggccctcggggttccagctttttggggaatactcaattaagtcatagccaacggcaatcactaagtcagcatgatcaaagccgcagctaatgtaatcccgctgttggagccccacggtccacagagcaagggggtgttgatagggaatgacccctttgcccatgaaggtattggccacggggatattcagcttttcggcaaaatgggtgagggcagcggcagcatgggcgcgaatggcgccattccccactaggatcagggggttctcggcagcattgatgagttcagcggccttaagaatactctggaaagaggcataggttttttcgggggagctgggcttaaggggagcgccctcggcttccatggcggcaatgttttcaggcacatcaatgtgaacggcgcccggcttctcattctgggcaattttaaaggccttgcggacaatttctggggtaatactagggcggacaatctgggcattccatttggttacggggctaaacatggccaccaagtccaaatattggtgggactcgatgtgcatgcgatccgtccccacttgccctgtaatcgccaccaggggagcgccgtcgaggttggcatcggcaacaccggtcattaaattcgtggccccggggccgagggtagaaagacagacccctgctttgccggtgaggcgaccatagacatcggccataaaggccgccccctgttcgtggcgggtggttataaattgaatccgagagcgatggagggcatggaggacatctagattctcttcccccggcaaaccaaaaatatattcaacgccttcattttcaaggcattttacgagtaattcggcggtattcataggatgggcgatcgcaggcactgaagtaagtaggaagcagggagcaggggaaagaaaattgacaactgtacaagattaatcgcgtctctgagcaatgaccaaatacatctacctccacggttttcttccagccccctatctgcgaaagcacaagatattagcaagcgtttcgcccaaattcacatacagctaacaatccctgatctcaatgctggtgaattttctcagttaacaatcacgcgccaaattcaacaagttgccgcaattttccctgataattctgaaccaataacgctgataggttctagtttaggcggtttaactgctgcttatctaggacagcgatatttacaagtacaacgcttagttttattagcgccagtttggttttttatcccattggttgcccaaaatgggtgaagaagctgtcacaagttggcaacaaacgatataggttctctcttctgccgtta

SEQ ID NO: 106 - DNA, 1661 bp, Artificial Sequence
  Synthetic Construct- Sequence No. 106, Example 106:  designer Anabaena PCC 7120 hox-promoter-controlled Ketol-Acid Reductoisomerase DNA construct (1661 bp)
agaaaatctggcaccacaccgcagaaatataggggctaggagttgagggtactctggttcgtcaagcatttgggatgatttcccctcacaagttcctcaaattattctcctataaacaatagatataaggtcaaaacttgagttatgagtgctgagtaaaaaattactctccacgcctcagaggtagatatgttaatttttatccttatccactatctttccttttccaagccagctcatcatacttctaagtttagatcccacctgctcgatgggatggttttcatcagccctggtgagggcattaaatactggtctgccagctttattttccagcatccattcttttgcaaattctcctgattgtatctgtcttaaaacttccctcatgttgtctttaacctggggatctattaccacaggcccccttgtgaggtcaccatattgggctgtgttgcttatggaatatctcatgttggagataccaccttcatagagaagatccactatcagttttacctcatgcatacattcaaaataagccatttctggagcgtagccagcctccaccaatgtttcaaaaccatatttaataagctgtgtcaaaccaccacataaaaccgcctgctcaccgaaaagatctgtttctgtttcctctttgaagtttgtttcaagcacacctgctctggctccaccaatggcagctgcgtatgacaaagccacctctcttgaatcaccggaatagtcttgatgcacagcgatgaggcatggtactccgccaccctttgtatattctgctcttacaagatgccctggccctttaggtgcaatcattataacgtttacgtttttaggaggcactatctgtccaaaatggatgttgaaaccgtgggcaaatgcaagatatgtcccctcttttatataaggggcaatctgctctctgtaaagatccccctgtatctcatcaggaacgagtatcatgatgaggtctgcccattttgtggcctctgatatctccataactttaagcccggagctttccgcttttttccaggaatcaccaccctttcttagggcaacggcaacgtcaacaccactatctttgaggttattagaatgtccataaccctgacttccgtaaccaactatggccacctttttctttttaatcaattctaaatttgcatccttttcgtagtatactttcattgaagtaagtaggaagcagggagcaggggaaagaaaattgacaactgtacaagattaatcgcgtctctgagcaatgaccaaatacatctacctccacggttttcttccagccccctatctgcgaaagcacaagatattagcaagcgtttcgcccaaattcacatacagctaacaatccctgatctcaatgctggtgaattttctcagttaacaatcacgcgccaaattcaacaagttgccgcaattttccctgataattctgaaccaataacgctgataggttctagtttaggcggtttaactgctgcttatctaggacagcgatatttacaagtacaacgcttagttttattagcgccagtttggttttttatcccattggttgcccaaaatgggtgaagaagctgtcacaagttggcaacaaacgatataggttctctcttctgccgtta

SEQ ID NO: 107 - DNA, 2324 bp, Artificial Sequence
  Synthetic Construct- Sequence No. 107, Example 107: designer Anabaena PCC 7120 hox-promoter-controlled Dihydroxy-Acid Dehydratase DNA construct (2324 bp)
agaaaatctggcaccacaccgcagaaatataggggctaggagttgagggtactctggttcgtcaagcatttgggatgatttcccctcacaagttcctcaaattattctcctataaacaatagatataaggtcaaaacttgagttatgagtgctgagtaaaaaattactctccacgcctcagaggtagatatgttataaatccgttatacatccaaaagatgctgatgataccagcttgctatacttccttaagcttccactcacatttcgctcgggctttataggagtttgctcctttcgtttttcccattcctcttcctccatcaatacactaattgaattttccactgcatctattctgatgcggtcgccattttctacataagctaatgcgccattatcaaaagcttcgggtgaaatgtgtcccactacaaaaccgtgagttcctcctgagaaccttccatctgtaatgagggctactttctttcccaaacctgctcccattatagcagcagttggctttaacatttcgggcattccaggacctccttttggcccttcatatcgaatcaccactacatcaccttcttttatctcgcctctggcaataccatcattggccagaaattcaccatcataaactctagcagttccttcgaatatctctccttcctttccggtgattttagcaacagctcctccaggtgctaaattgcctttcaatattcgcaaatgacctgagcttttgattggatttttcacagagtgaatgatgtcttgcttttcgcctaaaccctgaacatctttataattttcagctaaagttttacctgttatggtcatgcaatcgccatgaagaagtccttcccccaacatcattttcatcactgcaggaatcccgccattttgatgaagatcttccatcaagtatttaccagaaggctttaagtcggctagataaggagtttcggcactgattcgagcgaaatcttccaatgttaaatcgatttcaaaagcattggcaacagctaataaatgtaaaactgcattggtcgatcctcccaaaactgtaatcaaccgtatggcgttttcaaatgattttttagtgacgatatcccgtggcttcaaatcattttcaatcaattttttaatggctaaaccagcctctgcacattctttccttttctcagcactttgagcgggattggaagcaccataaggcaagcataatcctaaggcttcaatagcggatgccatcgtattggcagtgtacattcctccacaggctccaggacctgggcatgcatttgccactactcccttaaaatcttcttcagaaatagtgttggcttgcttcttacctaaagcttcaaaagcagaaaccacatctaatttttctccattatggcaacctggagcaatggttcctccataaattatgagtgaaggtcgattcaatctgcccatagccagtaaggcgcctggcatatttttatcgcatcccgtaatagcaatcatggcatcgtaagcttgcgcattcactaccgtttccatggaatcggctatgatatcgcgggaaggcaatgaatagcgcattccgttggtacccatagaaataccatcgcttactccaatagtattgaaaatcaaccctacccactcataagatttgatgcttttcttgacctctacagccaaatcattcaaatgcatattacatggattgccctcaaaaccagtgcttgcaatacctatttgtggtttttccaaatcttcatcagacaaaccaatggcatgcaacatggcttgagcggcaggttgtgtaggatcttgtgtaactgctttactatatggatttaattccttcgccattgaagtaagtaggaagcagggagcaggggaaagaaaattgacaactgtacaagattaatcgcgtctctgagcaatgaccaaatacatctacctccacggttttcttccagccccctatctgcgaaagcacaagatattagcaagcgtttcgcccaaattcacatacagctaacaatccctgatctcaatgctggtgaattttctcagttaacaatcacgcgccaaattcaacaagttgccgcaattttccctgataattctgaaccaataacgctgataggttctagtttaggcggtttaactgctgcttatctaggacagcgatatttacaagtacaacgcttagttttattagcgccagtttggttttttatcccattggttgcccaaaatgggtgaagaagctgtcacaagttggcaacaaacgatataggttctctcttctgccgtta

SEQ ID NO: 108 - DNA, 2288 bp, Artificial Sequence
  Synthetic Construct- Sequence No. 108, Example 108:  designer Anabaena PCC 7120 hox-promoter-controlled branched-chain alpha-Ketoacid Decarboxylase DNA construct (2288 bp)
agaaaatctggcaccacaccgcagaaatataggggctaggagttgagggtactctggttcgtcaagcatttgggatgatttcccctcacaagttcctcaaattattctcctataaacaatagatataaggtcaaaacttgagttatgagtgctgagtaaaaaattactctccacgcctcagaggtagatatgatgtatacagtaggagattacctgttagaccgattacacgagttgggaattgaagaaatttttggagttcctggtgactataacttacaatttttagatcaaattatttcacgcgaagatatgaaatggattggaaatgctaatgaattaaatgcttcttatatggctgatggttatgctcgtactaaaaaagctgccgcatttctcaccacatttggagtcggcgaattgagtgcgatcaatggactggcaggaagttatgccgaaaatttaccagtagtagaaattgttggttcaccaacttcaaaagtacaaaatgacggaaaatttgtccatcatacactagcagatggtgattttaaacactttatgaagatgcatgaacctgttacagcagcgcggactttactgacagcagaaaatgccacatatgaaattgaccgagtactttctcaattactaaaagaaagaaaaccagtctatattaacttaccagtcgatgttgctgcagcaaaagcagagaagcctgcattatctttagaaaaagaaagctctacaacaaatacaactgaacaagtgattttgagtaagattgaagaaagtttgaaaaatgcccaaaaaccagtagtgattgcaggacacgaagtaattagttttggtttagaaaaaacggtaactcagtttgtttcagaaacaaaactaccgattacgacactaaattttggtaaaagtgctgttgatgaatctttgccctcatttttaggaatatataacgggaaactttcagaaatcagtcttaaaaattttgtggagtccgcagactttatcctaatgcttggagtgaagcttacggactcctcaacaggtgcattcacacatcatttagatgaaaataaaatgatttcactaaacatagatgaaggaataattttcaataaagtggtagaagattttgattttagagcagtggtttcttctttatcagaattaaaaggaatagaatatgaaggacaatatattgataagcaatatgaagaatttattccatcaagtgctcccttatcacaagaccgtctatggcaggcagttgaaagtttgactcaaagcaatgaaacaatcgttgctgaacaaggaacctcattttttggagcttcaacaattttcttaaaatcaaatagtcgttttattggacaacctttatggggttctattggatatacttttccagcggctttaggaagccaaattgcggataaagagagcagacaccttttatttattggtgatggttcacttcaacttaccgtacaagaattaggactatcaatcagagaaaaactcaatccaatttgttttatcataaataatgatggttatacagttgaaagagaaatccacggacctactcaaagttataacgacattccaatgtggaattactcgaaattaccagaaacatttggagcaacagaagatcgtgtagtatcaaaaattgttagaacagagaatgaatttgtgtctgtcatgaaagaagcccaagcagatgtcaatagaatgtattggatagaactagttttggaaaaagaagatgcgccaaaattactgaaaaaaatgggtaaattatttgctgagcaaaataaatagtgaagtaagtaggaagcagggagcaggggaaagaaaattgacaactgtacaagattaatcgcgtctctgagcaatgaccaaatacatctacctccacggttttcttccagccccctatctgcgaaagcacaagatattagcaagcgtttcgcccaaattcacatacagctaacaatccctgatctcaatgctggtgaattttctcagttaacaatcacgcgccaaattcaacaagttgccgcaattttccctgataattctgaaccaataacgctgataggttctagtttaggcggtttaactgctgcttatctaggacagcgatatttacaagtacaacgcttagttttattagcgccagtttggttttttatcccattggttgcccaaaatgggtgaagaagctgtcacaagttggcaacaaacgatataggttctctcttctgccgtta

SEQ ID NO: 109 - DNA, 1613 bp, Artificial Sequence
  Synthetic Construct- Sequence No. 109, Example 109:  designer Anabaena PCC 7120 hox-promoter-controlled 2-Methylbutyraldehyde Reductase DNA construct (1613 bp)
agaaaatctggcaccacaccgcagaaatataggggctaggagttgagggtactctggttcgtcaagcatttgggatgatttcccctcacaagttcctcaaattattctcctataaacaatagatataaggtcaaaacttgagttatgagtgctgagtaaaaaattactctccacgcctcagaggtagatatgatggcttctgtaaatgactactttgagaacgccaagacgacgtactttactttgagatcgggtgacaagatccccgctgttggattgggtacttggcaatcacccaccaacgagactaaagaggcagtcaagtacgctttgcagcacggttaccgtcacatcgatgctgccgccatttatggtaacgaagacgaggttggtgacggtatcaaggagagtggaatccctcgtgaccaaatctgggtcacatctaagctctggtgcaatgctcatgctcccgaggctgtccccaaggctttggagaagaccttgcgtgagctgaaacttgattaccttgacctttacctcatccactggcctatttctttgaagaccggcgatgacttggttcccaaggacaaggacggcaacaccatcactgtcgaaattcccctcgaggacacctggaaggctatggagggtcttgtgaagtccggcaaggtgaagaacattggtatttccaatttcaacaacgaagagttggatcgtattttgaaggttgccgagattcctcctgccgtccaccaaatggaaactcatccttacttgaagcagacggagttcattgagaagcacaagaagcttggcattcacgtcaccgcttactcgcctttggccaaccaaaatgctctttacggcaatgccgttcccaagttgattgagcacaagactcttgtcgacattgccaagaccaagggtgagggcgtcactggtgccaacattgctatttcttgggcagtcaagcgcggtacttcggttattcctaagtctgttcatgccaacagaattaagagcaacttcctcgttgttcccttgactgatgacgagatgaaggccatcgataacattggtgtcagcaagcgtttcaattggagcaaagttttctgcaatgagaattgtttctacggtcttgaggatggtcctcagtaatgaagtaagtaggaagcagggagcaggggaaagaaaattgacaactgtacaagattaatcgcgtctctgagcaatgaccaaatacatctacctccacggttttcttccagccccctatctgcgaaagcacaagatattagcaagcgtttcgcccaaattcacatacagctaacaatccctgatctcaatgctggtgaattttctcagttaacaatcacgcgccaaattcaacaagttgccgcaattttccctgataattctgaaccaataacgctgataggttctagtttaggcggtttaactgctgcttatctaggacagcgatatttacaagtacaacgcttagttttattagcgccagtttggttttttatcccattggttgcccaaaatgggtgaagaagctgtcacaagttggcaacaaacgatataggttctctcttctgccgtta

SEQ ID NO: 110 - DNA, 1300 bp, Artificial Sequence
  Synthetic Construct- Sequence No. 110, Example 110: designer Prochlorococcus marinus MIT9313 groE-promoter-controlled NAD-dependent Glyceraldehyde-3-Phosphate Dehydrogenase DNA construct (1300 bp)
agaaaatctggcaccacaccccctttcagagcggcgcaacattaccactgcatggcgagatcttctcagggttcggtgacccgcacaggtatccactagtcggcacagcatcaacacacatagggttggcactcaatggccacgagtgctactcatgttatgccaagccgactttacgaaccaattccgcggtgcgcgtggcgtaacccatttcgttgtcataccaagtgtagattttcaccattcgcttaccaaccaccatggtggagagcgcatccacaattgttgaacgttgatcgccttggtaatcaatcgacaccagtggacgctcttcaaaacccagaatgcctttaagctcgttttctgaggcttgttttaacagctgattgatctcttccaccgtcgtatcacgctgcacatcaaaaatgatgtcggttaacgaggcattcgccaacggtacacgtacggcgtgtccatcaatcttgcctttcagatccgggaaaatttcgataatcgctttagcagagccggtggttgtggggatgaggctcataccgcaagcacgtgcacggcgtaaatctttatgcggtgcatccaaaatggtttgcgtattggttaggttatggatggtagtaaaagaggcttgtgcgatacccagtttttcatggattactttcaccactggagcaatacagttagtggtacaagaagcggcagtgacaatgcgatgttgctccggattgaagatgtgatcgttcaccccgaccacgatattggcgatcccctcttctttgacaggcgctgaaacgacgacgcgttttactccttgtgccaaatactggttcaagaattcgcctttacggtgcttacccgtagcctcaatcaccacatcacagcccgaccaatccactgcatcaatcgatttttcttgtgttgtgcgaatgcgtttgccgttgatcaggatagcatccgcttcactgcccacagcatgatgccaacgaccttgtaccgaatcgaactccaaaaggtgcgctaatgttgcagcatcacccgccacatcgttgatctgtacaaactcaatctcaggccaatcaaacgaagctcttaaagccaaacgcccaatacgaccaaatccattaattccgactttaattgccattgatttagtttcggtgtctatctcttaatagcctcgatttattttcggggctattaatcaactctcagaggcgacaagcttcttcttcccttacgacgtttttattggttggacatggcaaggttctctcttctgccgtta

SEQ ID NO: 111 - DNA, 1498 bp, Artificial Sequence
  Synthetic Construct- Sequence No. 111, Example 111: designer Prochlorococcus marinus MIT9313 groE-promoter-controlled Phosphoglycerate Mutase DNA construct (1498 bp)
agaaaatctggcaccacaccccctttcagagcggcgcaacattaccactgcatggcgagatcttctcagggttcggtgacccgcacaggtatccactagtcggcacagcatcaacacacatagggttggcactcaatggccacgagtgctactcatgaaatatgtaatcttacttggcgacggcatggccgacgaaaaaattgccgaactggacggcaaaacgcctcttcaatacgccagcacacccaatatggacaggctggcggcaggcggggaaaccggcatggtacataccgtcccggatggatttccgcctggcagcgatgtagccaacctctcggtaatggggtacaatccgcgggaatattataccgggcgttctccgctggaagcggtaagcatgggggttgaactttcagatgacgatgtagccttccgctgcaacctggttaccctgtcagaagaagaggtatatgaaaacaagattatggtggattacagctcggacgaaattaccacctctgaatcgcatgaactgatcagggaagtcgccaaccgcctgggcagtaaagagttgcgcttttacccgggtttcggatttagacaccttcttgtatggaaaacagggcctgttggcgggaagctaacaccaccccacgatatctcggggcgtaccattgccccatacctccccaaaggcgagggtagcgacactttaaagcggttaatgaaagaaagcaacaggttcctgccagagcacccggttaaccaaaaaagggtaagggccggtcttaggcctgccacttccatctggttctggggacagggaaagaaaccctcgataccgaagttctacgacaaatacggggtaaccggctctgttatctctgccgtggacctgattaaggggattggcatctgtgccggcttcgatatagttaaggtggagggtgtaacgggcaccatccataccaacttccgggggaaagtgcaggccgccctggaagaactgaaaaagggaaaggacctggtctacattcacgttgaggctccggacgcagcaagccacaggggtgaaactgttaccaaagttaaagctattgaaatggtggacaacatgctgggccagcttttaaacaaactggacgaattcggcatgtacaaaataatgctcttgcccgatcatccaaccccgctcagcactaaaacccactctaacagccctgtcccctttgttatctatgccaaggggcggaaaaataaaagcgccgcttcttttgacgaagaaacggcggcaaaaagcggacttgttttccgggcgggccatgagttaatggattactttatccgcagctaatgatttagtttcggtgtctatctcttaatagcctcgatttattttcggggctattaatcaactctcagaggcgacaagcttcttcttcccttacgacgtttttattggttggacatggcaaggttctctcttctgccgtta

SEQ ID NO: 112 - DNA, 1588 bp, Artificial Sequence
  Synthetic Construct- Sequence No. 112, Example 112: designer Prochlorococcus marinus MIT9313 groE-promoter-controlled Enolase DNA construct (1588 bp)
agaaaatctggcaccacaccccctttcagagcggcgcaacattaccactgcatggcgagatcttctcagggttcggtgacccgcacaggtatccactagtcggcacagcatcaacacacatagggttggcactcaatggccacgagtgctactcatggtgtacgtggaaatcgtggatgtaagagcaagagaggtcctggattcgagaggaaatcccaccgttgaagcggaagtcgtgcttgaagacggaacaatgggaagagccatcgtgccctctggtgcctccactggaaaattcgaagccctggaaatcagagacaaagacaagaagagatacctcgggaagggtgttctgaaggccgtagagaacgtgaacgaaaccatagctcccgcgctgattggaatgaacgcattcgaccagccactcgttgacaagacactgatagaactggatggcacagagaacaaatctaaactgggtgccaacgctatactcgccgtttctatggcagttgccagagcggcggcgaattacctcggattgcccctctacaaataccttggaggagtcaacgcaaaggttctgccagtacctttgatgaacgtgatcaacggtggacagcacgcagacaacaatcttgaccttcaggaattcatgatcgttcccgccggatttgacagcttcagagaagctttgagggcaggagcggaaatattccacacgttgaaaaagatactccacgaagccggtcacgtgacagcagtaggagacgagggtggattcgcacccaatctgtcttccaacgaagaagccataaaggttctgattgaagccatagagaaagctggctacaagcccggagaagaagtcttcatagctcttgattgcgcagcatcttccttctacgatgaggaaaagggagtttactacgtcgatggtgaagaaaaatccagcgaagttctcatgggatactacgaagaactggtggcgaagtaccccatcatatccatcgaagatccgttcgcggaggaagactgggatgcatttgtggaattcacaaagagagtaggaaacaaggttcagatcgttggagatgacctttacgtgaccaacgtgaaaagactttccaaaggaatagaactcaaagcgaccaactccatactcatcaaactcaatcagataggcaccgtcacggaaactctcgacgcggtggagatggcacagaagaacaacatgacagccatcatttcccacagatctggagagagtgaagacacgttcattgcggatctcgctgtggcaacgaacgctggtttcatcaagacaggttccctctccagaagcgaaaggatagccaagtacaaccagcttttgagaatcgaggaagaactcggaaaagtggcagaattcagaggtttgaaatctttctactctataaagagataatgatttagtttcggtgtctatctcttaatagcctcgatttattttcggggctattaatcaactctcagaggcgacaagcttcttcttcccttacgacgtttttattggttggacatggcaaggttctctcttctgccgtta

SEQ ID NO: 113 - DNA, 1717 bp, Artificial Sequence
  Synthetic Construct- Sequence No. 113, Example 113: designer Prochlorococcus marinus MIT9313 groE-promoter-controlled Pyruvate Kinase DNA construct (1717 bp)
agaaaatctggcaccacaccccctttcagagcggcgcaacattaccactgcatggcgagatcttctcagggttcggtgacccgcacaggtatccactagtcggcacagcatcaacacacatagggttggcactcaatggccacgagtgctactcatgatgagaaaaaccaagcttatatgttcgataggacctaaaaccgagaaaccagagaaaataaaggaattgctaaaaagaggggtaaatgcttttaggataagcgcagttcattacacgatggaaaaaatcacagagctggtagagctaatcaaagatattagatatgaactcaaaatgcctgtttccatcattcttgatttaccaggttgcaaactccggacgggagatcagaaagaagaaatcatcgaacttagacaaggtgaaaaagtgactgtaacaagcgaaaaaactttttcttctcgggatactataagcataaatttttccggaccatttcagggtgtaaaaaccggcgatttaatcctcgtagatgatggaaaaatacaactcagagtggaaagaatttctccaaaaaaagtagaatgcgtcgtggagataggaggaattttgaagaaaaacagtggcgtcaattttcccaattctgatctacctgtcgaagtaccaacagaagaagatattaagatcatagctgaaactgtcaatatgggactggactattactgtgtatcatttgcaagaaacgcaaaagatgttcaaaaaatcaaaaaacatcttgaatctttcgattcaagtgcgaaaattcttacgaaaatagaaacaaaaaaatccatagaaacgctggaagatatatgtcgcgtgagcgatggaataatcgtagcaagaggagatttagcggtggagacatctctgatagatttgccgatattgcaaaaaaagataataaataccgcatcaaattataaaatacctgtgatcgtcgcaaccgaaatactcaattctatgatcaacagttcatcaccaacaagggttgaaataatggatgttgcaaacatagttttagatggagcagatgctatactgctaacctctgaaacagctgtggggaactttccgatcgaaacagttgaaaaaattaatgagattgttgaaaatgttgagaactacctacccgaaatcaatgctcattttaaagaacgcaggtttgaaaaaatcgaagatccatctgaagctattgcaaggagtagttactacatttctgaagaaataaatgccaaagctataataatatcaacagcttctggaagcactgcaagaagggtggcctatttcaagccacttcgtcctatcatagctacgaccccagatgaaaacacctttcatcagttgtctattgtttgggggatagttccgatgctaattccagaagtccattccacagatataatgatccacgtggccgtcgagaaggttaaagctgtcggatatgttcaaaattccgacattgtggttgttacttctggtgctccgtgtggtattgttggaacaactaacatgctcaaagttcacatagttgagtagtgatttagtttcggtgtctatctcttaatagcctcgatttattttcggggctattaatcaactctcagaggcgacaagcttcttcttcccttacgacgtttttattggttggacatggcaaggttctctcttctgccgtta

SEQ ID NO: 114 - DNA, 2017 bp, Artificial Sequence
  Synthetic Construct- Sequence No. 114, Example 114: designer Prochlorococcus marinus MIT9313 groE-promoter-controlled Acetolactate Synthase DNA construct (2017 bp)
agaaaatctggcaccacaccccctttcagagcggcgcaacattaccactgcatggcgagatcttctcagggttcggtgacccgcacaggtatccactagtcggcacagcatcaacacacatagggttggcactcaatggccacgagtgctactcatgtcaagattgcttagaggcttctttattaaaatgttcctcaaatttttttggaaaacgctgatcggccaaatgaatgttgtcgctgtaatcgaccggaatatcaatgacaacaggcccctctgcatcaagaccagctttaagcacctctgccaattcgtcaggtgaattgacccttaaaccttttgcaccaaagctttcagcatattttacaatatcgattccgccgaagtcgactccggacgtccgcttgtatttcatctcctgctggaacgcaaccatatcgtatgtgctgtcattccagacaatgtgaacgatcggcgcttttaatctgaccgctgtctcaagctccatcgcggagaacaggaagcccccgtccccggaaacagacacgactttctgtcccggattgaccagcgttgctgcaatcgcccacggcaaagccaccccaagcgtctgcatgccgttggaaatcagcagtccatgcggacggtaggtgcggaaatatctagacatccaaatcgcatgggagccgatgtcgcaagtcaccgttatgtcatcgctcagcagttcacgcaaatcgcgaacgatttgcagcggatgaacaagatcagtttttgtttctttaggaggttcgctttgctcctccagtgctttcttcaagtaatcaaggacaggtgcaaaggactcgtcgatggaaaccggcagagaatcatgttcaatatggtttaacgtctctgcgatatcgccgatcaactcgatttcgggctgatagtcatgatcgatatcggcttgtatttcgtcaagatgaatcacgcttcgttcgccttttccattccaaaagaccggatcgtattcaatcggatcatagccgaccgtcaaaacgacatccgctttttccaatagcatgtctccgggctgattgcggaatagtccgatccggccgaagtactggtcttccaaatcgtgagacagcgtacccgctgcttggtatgtttcaacaaacggcagtttcactttccttagcagacgccgaaccgcttcaatcgcttcaggtcttccgcctttcatcccgacaagcacgacaggaaggttcgcattgtgaattttggcgatggccgcgctgatttgttcgtccgaagccgcgcccagcttcggcgccggcatggttttcaccggcttggcagttgccggaccggccgtaacgtcctgcggaaagctgagaaacgctgcgccagcctgtccagaagccgccgctctgaatgcattggttacagcctcaggtatgttgttcgcatcttccacttctgcgctatatttcgtaatcggctgaaacaacgccgcattatccatcgattgatgagtttttttgagacgatccgctctttttacagcacccgccagggcaacaaccggatctccttctgtattggctgttacaagaccggtcgctaaattagacgctcccggacctgaagtcaccaggcaaacaccgggctttccagtcaatcgtccgactgccgccgccataaatgctgcattctgctcgtgacggcaaacgatcaattcaggccccttgtctttcaatacgtcaaacaccgcatcgattttcgctcccggaataccgaaaacatgagtgacaccttgctgaatgagactatccaccacaagctctgctcctcttacagtaagagtttcatttttagcggctacattattcaatgatttagtttcggtgtctatctcttaatagcctcgatttattttcggggctattaatcaactctcagaggcgacaagcttcttcttcccttacgacgtttttattggttggacatggcaaggttctctcttctgccgtta

SEQ ID NO: 115 - DNA, 1588 bp, Artificial Sequence
  Synthetic Construct- Sequence No. 115, Example 115: designer Prochlorococcus marinus MIT9313 groE-promoter-controlled Ketol-Acid Reductoisomerase DNA construct (1588 bp)
agaaaatctggcaccacaccccctttcagagcggcgcaacattaccactgcatggcgagatcttctcagggttcggtgacccgcacaggtatccactagtcggcacagcatcaacacacatagggttggcactcaatggccacgagtgctactcatgtcactcctcatccacgttcctctccttgagccaaggcatcatttttctgagttcttttcctactttttctatgagatgctctgattctttctttctcatggtgtagaagtagggtcttcccgcctgattttcgagtatccagtccttggcgaactttcccgtctgaatgtccttgagcatctgcttcatgttctccctcacttcttttgtaacgatcttttcctgactgatgtagtcaccgtactccgcggtgttgctgacggagtatctcatgaaagagagaccaccctcgtagatgaggtcaacgatgagcttgagctcattgagacactcaaagtaagctatttccggttgataacccgcctccacaagagtttcgaaaccagcttttatgagagccgttactccaccacagaggaccgcctgctctccaaacaaatccgtttccgtctcttccttgaaggtcgtctctatcacacccgcccttgtcacaccgatacctttggcataagcgagcgctatatctttggctttaccggtgtagtcctgatagaccgctacgagagccggcacaccccttccttcgacgtattctcttctcacgatgtgaccagggctcttcggagcgatcatcgtcacatccacgttcttcggaggtatgatctggtgatagtggatgttgaacccgtgggcgaacatcagcatcttaccctcggtgaggtgtttttctatgtattttttgtagatctccggctggttctcatctgggatgagcatcatgatgatgtcggcctcttttgccgcttcttctattgctttcacggtgagaccctgttcctccgccttcttccagctcttgcttccctctctcaatccgaccacaacgttgagaccgctgtctttcagattcaacgcgtgcgcatgcccctgacttccgtaccctatgatcgcgatctttttgtccctgatcagttcgagatccgcgtctttgtcataataaatcactgccattgatttagtttcggtgtctatctcttaatagcctcgatttattttcggggctattaatcaactctcagaggcgacaagcttcttcttcccttacgacgtttttattggttggacatggcaaaacaatccagtcgagagctagcgcttgaacgccgtaaggccctgagtaattcaggtaagaaatcaaccacattaaatggatcaagtcctaatcgcatccgtactgcctctgatgcacgtctaaccaggactgatcaatctttcgttaaggctgggaaagaatctgtgcagctaaccgctcctaagagagagcaactagatacgtcttttgttgcttctagagaatcatccggagcttcgcgccgtcaagtgaaaacgatccgaaattcaagcagagaatggttctctcttctgccgtta

SEQ ID NO: 116 - DNA, 1960 bp, Artificial Sequence
  Synthetic Construct- Sequence No. 116, Example 116: designer Prochlorococcus marinus MIT9313 groE-promoter-controlled Dihydroxy-Acid Dehydratase DNA construct (1960 bp)
agaaaatctggcaccacaccccctttcagagcggcgcaacattaccactgcatggcgagatcttctcagggttcggtgacccgcacaggtatccactagtcggcacagcatcaacacacatagggttggcactcaatggccacgagtgctactcatgctaatctttcaagatagcgcctgtactggcggattgcaccatttttgaatatcttttcatatagcctgagtttatcttgggttccggaactcgccactgcgttctcctggcagcaagttcctcgtcgctaagtcgtacactaaggctgtggttcggtatatcaatgacgattatgtctccgtcctgaataagagcaatattgcccccttgtgccgcctcgggagatacgtgccctatagaagctccccgggtagcaccagaaaaacggccatcggttataagggctacgtccttgtctagccccatccccgctatagcagaagtaggcgtgagcatttccctcatccctggccctccgcgcggcccttcataccggattacgacgacttctcctttttcaatcttgcctcctagaatggctgcaacagcttcttcttccgagtcgaaaacccgtgctttaccctcgtgatagagcatgtccgggtcaactgcccccttcttcaccaccgcgccctcctcggccaggttaccgaacagtatagccaaccccccggtagtactgtgcggattctctatactacggatgacctcgtggtccttcacagggtagtcattgataacctccccaaccgtcttaccagtaaccgtcaggcactggcggtttaccagccctgccttgtctaactcgttgaaaatggcctgaactccacccgcagcgtacaagtcttctataaaatggttgccggcaggttcgattttacataggtgaggagtggtatcgctgatatggtttatcaggttcaagtccagcttaacgccggcttcgtgagcgatagccataagatgcaaaaccgtattggtagaacaacctattgccatgtccaggcgtaaggcattgatgaaagcctcttgggtcatgatatcccggggctttatgtccctttcccatagctccatcactttcatgcccgcctgtttggctagacggattcgttcagagtgtaccgccggtatagttccgttcccgggtaagcccattcctaccgcttccgtcaggcagttcatggaattagcggtaaacataccggcacagctgccacaacccgggcaagctacatcttcaagctccgctaagtccgaaagcgacatcttacctgcgctgaccgcgcctaccccttcaaagaccgtgttgaggctgaccttgcgcccccggaaattgccagccaacatcggccctccgctgacaaacatacaaggaagattgaggcgagcggccgccatcagcatcccagggatgattttgtcgcagttaggtataaaaaccagggcatcgaaaggatgagccatagccattatctcaatagaatcggcaatcagttcccggctggccagagagtatttcataccgatatggttcatggcaataccatcgcatacccctatagtagaaaactctataggagtgccccctttcatcctcaccccggctttgaccgcctcggctatacggtctagatgaatatgccctggaataatctcgttggccgagttgactataccgactaagggtctctccaactcctcatcggtcaatcctaaagctttaaacagtgaacggtgaggtgctttttctagaccctttttcgccaggtcacttctcattgatttagtttcggtgtctatctcttaatagcctcgatttattttcggggctattaatcaactctcagaggcgacaagcttcttcttcccttacgacgtttttattggttggacatggcaaggttctctcttctgccgtta

SEQ ID NO: 117 - DNA, 1945 bp, Artificial Sequence
  Synthetic Construct- Sequence No. 117, Example 117: designer Prochlorococcus marinus MIT9313 groE-promoter-controlled 2-Keto Acid Decarboxylase DNA construct (1945 bp)
agaaaatctggcaccacaccccctttcagagcggcgcaacattaccactgcatggcgagatcttctcagggttcggtgacccgcacaggtatccactagtcggcacagcatcaacacacatagggttggcactcaatggccacgagtgctactcatgttatgatttattttgttcagcaaatagtttacccatttttttcagtacttttggtgcatcttcttttgccaaaactaactcaatccagtacattctatttggatctgcttgagcttctttcatgacagacacaaattcattttcagttctaacgattttcgagactactcgttcttctgttgctccaaatgattctggtaattttgagtaattccacattggaatatcattgtagctttgatttggtccatgaatttctctttcgactgtataaccatcattattgataataaagcaaattggattaattttttctctgattgctaatcctaattcttgcactgtaagttgaagtgaaccatcaccaataaataaaaggtgtctgctttctttatctgcaatttggcttcctaatgctgctgggaatgtatatccaattgatccccataagggttgaccaataaaatgactctttggttttaagaaaattgatgaagcgccaaagaatgatgtcccttgttcagcaacgattgtttcattgctttgagttaggttttcaactgcttgccataggcggtcttgtgataaaagcgcatttgatggaacaaagtcttcttgctttttatcgatatattttcctttgtattctattccgcttaggtctaagagagaggagatgagggattcaaaatcaaaattttggatgctttcgttaaatatttttccttcgtctatgttcagtgaaatcattttattttcatttaaatgatgggtaaatgctcctgttgaagagtctgtgagtttaactccaagcatcaggatgaagtcggctgattccacgaattctttaagattaggctctgagagtttaccattatagattcctaaaaatgaagggagagtttcatcaactgaactttttccaaagtttaatgtcgtaatagggagttttgtctttgaaataaattgagtgactgtattttctaagccaaagctaattatttcatgtcctgtaatcacgattggttttttggcatttttcaagctttcttgaattttattcaaaatctcttggtcacttgtatttgaagttggattttcttttttcaaagggagtgagggtttctctgcttttgcagcagcaacatcaactggtaagttgatatagacaggttttctttcttttagtagtgcagaaagtactcggtcaatttcaacggttgcattttctgctgtcagtaaagttcgagctgctgtaacaggttcgtgcattttcataaagtgtttaaaatcaccgtcagccagcgtatgatgaacaaattttccttcattttggacttttgatgtaggtgatcccactatttctactactggtaaattttcggcgtaacttcctgctaatccattaactgcactcaattcacctactccaaaggttgtaagaaatgcggcagcttttttagtacgagcatagccatcagccatataagaagcatttaattcattagcatttccgacccatttcatatccttgcgggaaataatttgatctaaaaattgtaagttatagtctccagggactccaaaaatttcttcaattcctaactcgtgtaatcggtctaataggtaatctcctactgtatacattgatttagtttcggtgtctatctcttaatagcctcgatttattttcggggctattaatcaactctcagaggcgacaagcttcttcttcccttacgacgtttttattggttggacatggcaaggttctctcttctgccgtta

SEQ ID NO: 118 - DNA, 1138 bp, Artificial Sequence
  Synthetic Construct- Sequence No. 118, Example 118: designer Prochlorococcus marinus MIT9313 nirA-promoter-controlled Alcohol Dehydrogenase DNA construct (1138 bp)
agaaaatctggcaccacacccctctagttgccaacatcagccgggttcagaatgtacacaaagacaccaattcttgaatttcacacaaatgctcagttttgttcaatctgataccgccaataccctcttccatcaggcttaatgactccattcgcaacttacccttgcttcaataatggcagggcctaaaaaccatggctatcgaatgcgcgaataaaatttaaacaacatgatcacttcttttcaagtttaatttcaacaaaatttcatgttgtcaccggtggagcgaatgggatcggcaaggcgatcgctagagcaattcgcaaaacagggagcgaacgtcgtgatcatcgaccgcgatattcaaaacggtgaagcgttcgccgcgcaattgcaatcggacgggttcgaggcgatctttgtggcggcggatgtgcggaaggtggacgatattgaacggtttgtacaagaagctgccggccgcttcggccgcattgactatttgatcaacaatgctggcgtctcacgctggaagtcgccgtatgagctgacggttgaggagtgggatgacgtgctgtcaacgaatttgcgcagcgctttttttgcttctcgagaagcagctaaatatatgcgccgcaatgcaaaaggcggagcaatcgtcaacattgcctcgacaagggcgctcatgtccgagccgaattccgaggcgtacgctgcatcgaaaggcggccttgtcgctttgacccatgcgctggcggtgtcgtttgcggatgatcgcattcgcgtcaattgcatcagccccggttggattgaaacgggcgattatgggcaactgcgagacattgaccaccggcagcacccggccggccgcgtcggcaaaccggatgatatcgcccgcgcttgtctgtatttatgcgatgaggaaaacgattttatcaccggggtaaatttggtcatcgacgggggaatgaccaggaaaatgatttatattgagtagtgatttagtttcggtgtctatctcttaatagcctcgatttattttcggggctattaatcaactctcagaggcgacaagcttcttcttcccttacgacgtttttattggttggacatggcaaggttctctcttctgccgtta

SEQ ID NO: 119 - DNA, 1816 bp, Artificial Sequence
  Synthetic Construct- Sequence No. 119, Example 119: designer Prochlorococcus marinus MIT9313 groE-promoter-controlled 2-Isopropylmalate Synthase DNA construct (1816 bp)
agaaaatctggcaccacaccccctttcagagcggcgcaacattaccactgcatggcgagatcttctcagggttcggtgacccgcacaggtatccactagtcggcacagcatcaacacacatagggttggcactcaatggccacgagtgctactcatggtgagccagcgcgtttatatttttgacaccactttgagggacggcgagcagtcgcccggcgtaagcctgaacgtaggcgagaaggtgcaaattgccaggcagttagccaagctcggggtggacataattgaggccggctttccgattacctcgccgggggactttaaagccgtaagcgaaattgcccggcaggtgaagggcgttacggtggccgccctggccagggccaacttccaggatatcgaccgggcctgggaggccgtgcgccacgccgagcagccgcggattcatacctttattgccacttccgacattcatttaaaatacaagctgcgcatgagccgggaggaagtcctggatgcggcggtggcggcggtaaagcgcgccagggcctacaccggcgatgtggagttttcggcggaggacgcctcccgctccgacctggacttcctctgccgggtgctggccgcggccattgaggcgggggctaccgtaataaatataccggatacggtcggttatgccgttcctgaggaatgggggaaatttatcaatactatttatcataaagttcccggaattgaaaaggtcattgtcagcgtgcactgccacaacgacctgggcatggccgtggccaactcccttgctgccgtaatgaacggcgccaggcaggtggaaggggccatcaacggcattggcgagcgggcgggaaacgctgccatcgaagagatggtaatggccctttatacccgtaaagatcagtacaacctttacaccaacatcaaaaccgaggaaatttacaggaccagcaagctggtgagcgccctgacgggcatgaaggtgcagccgaacaaggccgtggtgggcaaaaacgcctttgcccacgaggccggcattcaccaggacggggtgctgaaggagcgcaccacctacgagataatgaacccggccatggtagggatcagcaagagcaacctggtgctgggcaagcattccgggcggcatgcattccgccaccggctggaggaaatgggctacaatctttcggacgaagagctgaacagcgcctttgagcgcttcaaaaagctggccgacaagaagatggagattaccgacgaagacctggaagccattatagaagaagaaatgcgccttgtgccgcacacctacacccttgagtacctgcatatttccagcggcaccacggtggtgcctaccgccacggtgggcttaaagcgggacgggcagcttatggaagaggcggcctgcggcaacggcccggtggacgccatctgcaaggcaattgataaaataacggggcttaactgcaccatgacgagctggggaatcaacgccgtcactgcgggcaaggacgcccttggcgacgtcagcctgaaggtgaccgccgacggcgagaaggtttacgttgggcgcggaatcagcaccgatgtgctggaggccagcgccaaagcttacgtcaacgcggtcaacaaactcatctgggattcgcagaaataatgatttagtttcggtgtctatctcttaatagcctcgatttattttcggggctattaatcaactctcagaggcgacaagcttcttcttcccttacgacgtttttattggttggacatggcaaggttctctcttctgccgtta

SEQ ID NO: 120 - DNA, 2199 bp, Artificial Sequence
  Synthetic Construct- Sequence No. 120, Example 120: designer Prochlorococcus marinus MIT9313 groE-promoter-controlled 3-Isopropylmalate Dehydratase DNA construct (2199 bp)
agaaaatctggcaccacaccccctttcagagcggcgcaacattaccactgcatggcgagatcttctcagggttcggtgacccgcacaggtatccactagtcggcacagcatcaacacacatagggttggcactcaatggccacgagtgctactcatgatggccatgaccataaccgaaaaaattctggccgatcacgccggcaaaaagcaggttgagcccggcgaactgatcagcgtaaaggttgatctggtgctgggcaacgacataacggcgccggtggcgattaaagagtttgagaaaataggggtggcggaagtctttgaccgggagcgggtggccctggtcccggatcactttacccctaacaaggacattaagtcggcggaacagtctaaaattctaagggagttttccaaaaagcacaaccttgccaactatttcgaggtgggccgggccggcattgagcactgccttctgcccgaggaagggctggtaggccccggcgacctggttatcggcgccgactcgcacacctgcacctacggcgccctgggggccttctccacgggcgtgggcagcaccgacctggcggctgccatggcgctgggggaaacctggctgaaagtgccggagtcaatcaaattcgaatatgacggggaaatgcagccctgggtaggcggcaaggacatgatcctgcacacaatcggggatatcggggtggacggggccctttacaaggctatggagtttaccggcccggccgttgaaaaactttccatggacgggcgctttaccatgtgcaacatggccgtagaggccgggggtaagaacggcattattgctccggacgaaacaacccgggtctatgtcgagggccgctgcaagcgaccctatcgtttttatcggagcgacccggacgccaaatacgaaaagatctaccgctacgacgcggcgcagatcgaaccgcaggtggcctttccccacctgcccgaaaactcccggccggtcagcgaggcaggcaacattgaaatcgatcaggttgttatcggctcctgcaccaacggccggatggaggacctgcgggaggccgccagggtgctgaagggcagaaaagtgcataaaaacgtccgccttattatttttccgggaacgccgaaaatttacctgcaggccttgcgggaggggctgatcgaaacttttgtcgaagctggcggagtcgtgagcacgcccacctgcgggccctgcctgggcggccactcgggcattctggccaggggagagcgctgcgttgccaccaccaaccgcaactttgtaggcaggatggggcatcctgaaagcgaagtgtacctgtccaacccggcagttgccgcggcttcggccgtgctgggccggataggcggtccatgggaggtggattgaccctttcagagcggcgcaacattaccactgcatggcgagatcttctcagggttcggtgacccgcacaggtatccactagtcggcacagcatcaacacacatagggttggcactcaatggccacgagtgctactcatgatggaaattaaagggaaagtgtggaagttcggcccggatatcgatacagacgccattataccggcaaggtacctcaacacctccgacccggaagaactggccaggcactgcatggaggatgccgacccgtcctttcccgcccgggtcaggcccggcgacgtgattgtggccggcaagaatttcgggtgcggcagttcccgggagcacgcccccatagcaatcaaggccgccggggtgtcgtgcgtgattgccgcgtcgtttgcgcggatcttctaccgcaacgccttcaacatagggctgcccattttcgagtctcccgaagccgccgggggcattggccagggcgacgaggtggcggtggacgcggctgccggcattataaccgacctgaccaccggcaagacctaccgggcggcgccggttccgcctttcatgcggcagatcattgccgccggagggctgatcaattacgtggccgggaaggtgagaggcaatgcataatgatttagtttcggtgtctatctcttaatagcctcgatttattttcggggctattaatcaactctcagaggcgacaagcttcttcttcccttacgacgtttttattggttggacatggcaaggttctctcttctgccgtta

SEQ ID NO: 121 - DNA, 1378 bp, Artificial Sequence
  Synthetic Construct- Sequence No. 121, Example 121: designer Prochlorococcus marinus MIT9313 groE-promoter-controlled 3-Isopropylmalate Dehydrogenase DNA construct (1378 bp)
agaaaatctggcaccacaccccctttcagagcggcgcaacattaccactgcatggcgagatcttctcagggttcggtgacccgcacaggtatccactagtcggcacagcatcaacacacatagggttggcactcaatggccacgagtgctactcatgctacacctcgacctcctcaacttttctcgctactaaatcacccatttccctggtgttaaccagcttctgatccggctccgtaatgtccggcgtccggtagccttcggccagaacttcgcggaccgcctgctcaaccgccaaagcctcttgttccaaatcgaacgaatacctcagcatcatggcagccgacagtatcgtagccaacgggtttgctttcccctgcccggcgatatcgggagctgacccgtgagaaggctcatacattcctactttcccgccaatagaggcagaaggtagcattcccaaagatccggtcagcatagaggcttcgtcggtcaatatatctccaaacatgttttcagttacgatcacatcgaattgacgcggattgcgtatgagctgcatggcacagttgtcgacgtacatgtggctgaattcgacgtcaggatactccagagctactcgattggccacctcgcgccataacctagagctttctagaacattggccttgtccaccgatgtcactttctttctccgtttcctcgccgcctcgcaggccaaacgaactatgcgttcgatctcatacgtcgagtactccagaacatcgatagccctttctccgcccagaagcttctcccgccgcttctccccgaagtacaacccgccggtcagttccctcactaccaagagatctactccctcgataatatcgggtttcagggaggaagcatgaaccagttccgggaacaggtaagcgggccgcaggttagcgtaaagcccaagttccttacgcagagccaacagcgctgccgcctcgggcctgagcgcagccggcaggttatcccatttgggaccacctatggctcctagaagaacagcgtcgctatctttgcacagggccagggtttcttcaggcaaaggaacccccacctcgtcgatagccgctcccccgaccagggcttcggtaaaagcgaattcgtgtttgaacctcttagcaactgctttcaatactttttgcgcttcaggtacgatctcggtcccgataccatccccgggtaacacggctatcttaaacactgatttagtttcggtgtctatctcttaatagcctcgatttattttcggggctattaatcaactctcagaggcgacaagcttcttcttcccttacgacgtttttattggttggacatggcaaggttctctcttctgccgtta

SEQ ID NO: 122 - DNA, 1327 bp, Artificial Sequence
  Synthetic Construct- Sequence No. 122, Example 122: designer Prochlorococcus marinus MIT9313 groE-promoter-controlled 3-Methylbutanal Reductase DNA construct (1327 bp)
agaaaatctggcaccacaccccctttcagagcggcgcaacattaccactgcatggcgagatcttctcagggttcggtgacccgcacaggtatccactagtcggcacagcatcaacacacatagggttggcactcaatggccacgagtgctactcatgatgtcagttttcgtttcaggtgctaacgggttcattgcccaacacattgtcgatctcctgttgaaggaagactataaggtcatcggttctgccagaagtcaagaaaaggccgagaatttaacggaggcctttggtaacaacccaaaattctccatggaagttgtcccagacatatctaagctggacgcatttgaccatgttttccaaaagcacggcaaggatatcaagatagttctacatacggcctctccattctgctttgatatcactgacagtgaacgcgatttattaattcctgctgtgaacggtgttaagggaattctccactcaattaaaaaatacgccgctgattctgtagaacgtgtagttctcacctcttcttatgcagctgtgttcgatatggcaaaagaaaacgataagtctttaacatttaacgaagaatcctggaacccagctacctgggagagttgccaaagtgacccagttaacgcctactgtggttctaagaagtttgctgaaaaagcagcttgggaatttctagaggagaatagagactctgtaaaattcgaattaactgccgttaacccagtttacgtttttggtccgcaaatgtttgacaaagatgtgaaaaaacacttgaacacatcttgcgaactcgtcaacagcttgatgcatttatcaccagaggacaagataccggaactatttggtggatacattgatgttcgtgatgttgcaaaggctcatttagttgccttccaaaagagggaaacaattggtcaaagactaatcgtatcggaggccagatttactatgcaggatgttctcgatatccttaacgaagacttccctgttctaaaaggcaatattccagtggggaaaccaggttctggtgctacccataacacccttggtgctactcttgataataaaaagagtaagaaattgttaggtttcaagttcaggaacttgaaagagaccattgacgacactgcctcccaaattttaaaatttgagggcagaatataatgatttagtttcggtgtctatctcttaatagcctcgatttattttcggggctattaatcaactctcagaggcgacaagcttcttcttcccttacgacgtttttattggttggacatggcaaggttctctcttctgccgtta

SEQ ID NO: 123 - DNA, 2004 bp, Artificial Sequence
  Synthetic Construct- Sequence No. 123, Example 123: designer Cyanothece sp. ATCC 51142 nirA-promoter-controlled 2-Isopropylmalate Synthase DNA construct (2004 bp)
agaaaatctggcaccacacctattaaatctaaaatagctgttttagctaaaatagtcaatagcaagtcttataggtaatcaaacgcaactaaaatgcaaaaaatccataattaaaatgcaaaaaacggatttttaatacaattttgttacattagctacaaaatatctcaaatggtagaggttaaataggtacaactcgaccagatggagggttttccctgtgatgaactgttccttcttcccttatactctccttggatagaatgtagttccttctcatgatggctctgtttaaggcatctacaaaaccgcttacgctggcttttattatgtccgtatccacgcctctacctgaggcttttacattatccagctctatcacaaggcgcgcctctgcctgcgcatccgtgttgggggtgagagcttttatagaaaagtcaatgagtctgggctccaccttaagagctttctgtatggcttttatcacagcatccacaggaccgtttcccgtagatgtggcagtcctttcttcacctctaaagctcagcactactgtagcggtaggaagcaggttgtcccctgtctgaacctgatagtgttttacctttataggctcttcctcctccaccttcataaactcttcgtatatgagggcttccaaatcctcatcatatacctcctttttcttatccgcaagagccttgaacttttcaaagatcctctccaggtcttcatcgcttagcttaaagccaagttcattcagtctcctctttagagcgtgcctccctgagtgtttaccaagtattattctggtggagggaaaacctacatcctcggggttcattatctcgtaggtgagagggtgagccagcacaccgtgctggtgtatgcccgattcatgagcaaaggcattatcccccactatagccttgttgggttgaacaaaagagccggttatcctgcaaaggagcctgctggttttgtatatctctctggtgtttatgtccgtgtagagccctccaaagaagtctttgcgcactttgagagccatcactatctcctcaagggctgcgtttcctgctctttcacctatgccgttgatggtgcactctacctgtcttgcaccgtgctttaccgccataagggagttggcaacagccatcccaaggtcatcatgacagtgcacgcttataatggctctgtctatgttgggcacgttgttccttatgtcctctatgagccttgcaaactcttctggcaccgcatagccaacggtgtcgggaatgtttataacggtagcacctgcctttatggctgtttctatcaccctgtagaggaactctctctggcttctggtggcatcctcgcaggaaaactccacatcgtcagtaaaccttctggcaaactccacagcttttttagccctttccagaacctcctctggggacatcctaagcttgtacttcatgtgtatctcggaagtagctatgaaggtgtgtatcctctttcttctggctggctttagagcctcccctgctagctctatgtccttttccaatgctctggcaagggagcatattatcggaccttctacctgctgtgctatcagatggacgctctcaaagtctcccttagatgctgctgcaaagcctgcctctataacatccacccccagcttggcaagttggtgagccatctgaagtttttcatcagcagtcatagaaaaacccggcgcttgctctccgtctctcagcgtggtgtcaaatatgtaaaccttctccattaagctgttttagagaaatttgttcggtaaatattagcctacctacagttgttgtgggtaggctaatattatgaattgagtcctactgaaccaatgattatcgttacgactaaaagtaataaatgtcatcagcaggataggggttgataggaaaagttttttaatcggatggttttcgagttagaggttagggtttctttaggttctctcttctgccgtta

SEQ ID NO: 124 - DNA, 2648 bp, Artificial Sequence
  Synthetic Construct- Sequence No. 124, Example 124: designer Cyanothece sp. ATCC 51142 nirA-promoter-controlled Isopropylmalate Isomerase large/small subunits DNA construct (2648 bp)
agaaaatctggcaccacacctattaaatctaaaatagctgttttagctaaaatagtcaatagcaagtcttataggtaatcaaacgcaactaaaatgcaaaaaatccataattaaaatgcaaaaaacggatttttaatacaattttgttacattagctacaaaatatctcaaatggtagaggttaaataggtacaactcgaccagatggagggttttccctgtgatggtgccaaagacgattattgaaaaaatttgggatgaacacgtggtttaccgtgaagatgggaaacccgatttattatatattgatttacatctcgttcatgaagtgacatcgccgcaagcttttgaaggattgcgacaaaaaggaagaaaagtgcgtcgcccagatttaacatttgcgacgatggaccataacgttccaacgattaatcggtccgttgttgaagatgaagtggcgaaaaatcaaatgacagcattggagcggaactgtcgtgagttcggtgttccgcttgccgatttaaacagtccagaacaagggattgttcatgtcatcggtccagaactcgggttgacacagcctgggaaaaccattgtgtgtggagatagccatacgtctacacatggcgcttttggggcattagcgttcgggatcggaacgagtgaagtcgaacacgtattagcgacgcaaacgttatggcaacatcgtccaaagacgatgcaagtgaacgttacgggatcgttagcaccgggcgtatcagcaaaagacgttattttagcgatcattggcaagtttggagttgattttggcacaggctacgtgcttgagtttacaggcgatgttattcgtcgtatgtcaatggaagagcggatgacaatttgcaatatgtcgattgaagcaggggcacgagctgggttaattgccccagatgatgtgacgtttgcatatttaaaagagagaaaatatgcaccgaaaggagaagcgtttgagcaggcagttgaaaagtggaagcagttatgcacagatgaaggagcggtatacgatcgtgtcgttcatattgatggaagtgaaattgctccaacagtgacatggggcacaacgccagcaatgagctctccgatcgatggaactgttccagatccgaacgagtttgcgacagaaacagagagaaaagctgtacagttagcgttgcaatatatgggattaaagccaggaacgaaaatgacggatattgcggtgcaacatgtgtttatcggatcatgcacaaactcgcgcataagcgatttacgggaagcggcgcaaattgtaaaaggaaaaaaagtcgcaccgggcgtcagagcgctcgtcgttccgggctcacaacaagtaaaaaagcaggcagaagaagaaggaattgctcaaacgtttattgacgcaggctttgaatggcgcgattccggctgtagcatgtgtcttggaatgaatccagatactgttccagcaggggaacattgcgcctcaacgtcaaaccgcaatttcgaagggagacaaggaaaaggggcgcgcacgcatctcgtgagtccagcaatggcagccgcggctgcgatttacgggcattttgtcgatgtgcgtacattgtataaagaagtggtaagatagtattaaatctaaaatagctgttttagctaaaatagtcaatagcaagtcttataggtaatcaaacgcaactaaaatgcaaaaaatccataattaaaatgcaaaaaacggatttttaatacaattttgttacattagctacaaaatatctcaaatggtagaggttaaataggtacaactcgaccagatggagggttttccctgtgatggaaccattcgtcgttcataaaggaaaagtggctggcttagatcgagcaaatatagatacggatcaaattattccgaaacaatttttaaaacgaattgaacgcaccggatttggtcaatttcttttttacgattggcgttatttatcggacggaacaccaaacccacattttgagttaaaccgtcctgaaaacgagggcgcgaccattttagtcgcaaatgaaaatttcggatgtggttcatcgcgcgaacacgctccttgggcgcttgcggattacggatttcgtgccattattgctccttcatttgctgatattttttacaacaactgtttgaaaaatagtttacttcctattaaacttccaaaagaagacgtcgcttatttgttaaaacaagcggaacgggcagattacgaactaacgatttcgcttgaacaacaagtcgtttttgatgatgaagggtttacaagctcgttcgacatcgatccgtatcgaaaacagctccttttaaaaggttgggacgaaattgatttaacgttcgtgtatgaaccatatattatcgcctacgaaaaaaaacgctcttgataagctgttttagagaaatttgttcggtaaatattagcctacctacagttgttgtgggtaggctaatattatgaattgagtcctactgaaccaatgattatcgttacgactaaaagtaataaatgtcatcagcaggataggggttgataggaaaagttttttaatcggatggttttcgagttagaggttagggtttctttaggttctctcttctgccgtta

SEQ ID NO: 125 - DNA, 1530 bp, Artificial Sequence
  Synthetic Construct- Sequence No. 125, Example 125: designer Cyanothece sp. ATCC 51142 nirA-promoter-controlled 3-Isopropylmalate Dehydrogenase DNA construct (1530 bp)
agaaaatctggcaccacacctattaaatctaaaatagctgttttagctaaaatagtcaatagcaagtcttataggtaatcaaacgcaactaaaatgcaaaaaatccataattaaaatgcaaaaaacggatttttaatacaattttgttacattagctacaaaatatctcaaatggtagaggttaaataggtacaactcgaccagatggagggttttccctgtgatggcaaccacgtatcgcattgctgttttggcgggggatggtattggcccagaaattacggccgttgcccttgatgtattgcgggcgatcgcccctcgctttgggttggactttgactttgttcccgcccttgtggggggctgcgccattgatgctgtgggggaacccttgccagcagcaacgctagccacctgtcgtcagagtgatgccgtgctcctagctgccattggcggaacgcagtgggatagcctaccccgtcatctgcgcccggaaaccggattacttgccctgcggtctggtctaggtttatttgccaacctacgccccgccaaaatctttccccagcttctccatgcctcctccctcaagccggaagtgattgccggtgtggatctcatggtggtgcgcgaactgacgggtggcatttactttggtcaaccgcgcggtattttcaccactgaaacgggtgagcagcggggggtgaatacgatggcctataccgccacggaaattgatcgcattggccgtgttgcctttgaaaccgctcgcaaacggcagggcaaactctgctccgtggataaggccaatgtccttgaagtctcccaactgtggcgcgatcgcctgaccgccctcagtgctgagtacccggatgtggaactgacgcacctttatgtggacaatgcagcaatgcaactggtgcgcgccccgaaacagtttgacacgattgtgaccagtaacctctttggtgatatcctctccgatattgccgccatgctcaccggtagtattggcatgcttccctccgccagcctaggggaatcggggccagctctgtttgaaccggttcatggctctgcccccgacattgccggccaagacaaggccaaccccctcgccatggtgctcagtgcggcaatgatgctgcgttatggtctgaaccaaccagcggcagcgcaagcgatcgaagaggccattactgccgttttagatcagggctaccgcaccggcgatttaatgtctgagggctgcacgcttgtgggctgtcgcgaaatgggcaacctcctaatcaaggaattgtcccgataataagctgttttagagaaatttgttcggtaaatattagcctacctacagttgttgtgggtaggctaatattatgaattgagtcctactgaaccaatgattatcgttacgactaaaagtaataaatgtcatcagcaggataggggttgataggaaaagttttttaatcggatggttttcgagttagaggttagggtttctttaggttctctcttctgccgtta

SEQ ID NO: 126 - DNA, 2088 bp, Artificial Sequence
  Synthetic Construct- Sequence No. 126, Example 126: designer Cyanothece sp. ATCC 51142 nirA-promoter-controlled 2-Keto Acid Decarboxylase DNA construct (2088 bp)
agaaaatctggcaccacacctattaaatctaaaatagctgttttagctaaaatagtcaatagcaagtcttataggtaatcaaacgcaactaaaatgcaaaaaatccataattaaaatgcaaaaaacggatttttaatacaattttgttacattagctacaaaatatctcaaatggtagaggttaaataggtacaactcgaccagatggagggttttccctgtgatgtatacagtaggagattacctgttagaccgattacacgagttgggaattgaagaaatttttggagttcctggtgactataacttacaatttttagatcaaattatttcacgcgaagatatgaaatggattggaaatgctaatgaattaaatgcttcttatatggctgatggttatgctcgtactaaaaaagctgccgcatttctcaccacatttggagtcggcgaattgagtgcgatcaatggactggcaggaagttatgccgaaaatttaccagtagtagaaattgttggttcaccaacttcaaaagtacaaaatgacggaaaatttgtccatcatacactagcagatggtgattttaaacactttatgaagatgcatgaacctgttacagcagcgcggactttactgacagcagaaaatgccacatatgaaattgaccgagtactttctcaattactaaaagaaagaaaaccagtctatattaacttaccagtcgatgttgctgcagcaaaagcagagaagcctgcattatctttagaaaaagaaagctctacaacaaatacaactgaacaagtgattttgagtaagattgaagaaagtttgaaaaatgcccaaaaaccagtagtgattgcaggacacgaagtaattagttttggtttagaaaaaacggtaactcagtttgtttcagaaacaaaactaccgattacgacactaaattttggtaaaagtgctgttgatgaatctttgccctcatttttaggaatatataacgggaaactttcagaaatcagtcttaaaaattttgtggagtccgcagactttatcctaatgcttggagtgaagcttacggactcctcaacaggtgcattcacacatcatttagatgaaaataaaatgatttcactaaacatagatgaaggaataattttcaataaagtggtagaagattttgattttagagcagtggtttcttctttatcagaattaaaaggaatagaatatgaaggacaatatattgataagcaatatgaagaatttattccatcaagtgctcccttatcacaagaccgtctatggcaggcagttgaaagtttgactcaaagcaatgaaacaatcgttgctgaacaaggaacctcattttttggagcttcaacaattttcttaaaatcaaatagtcgttttattggacaacctttatggggttctattggatatacttttccagcggctttaggaagccaaattgcggataaagagagcagacaccttttatttattggtgatggttcacttcaacttaccgtacaagaattaggactatcaatcagagaaaaactcaatccaatttgttttatcataaataatgatggttatacagttgaaagagaaatccacggacctactcaaagttataacgacattccaatgtggaattactcgaaattaccagaaacatttggagcaacagaagatcgtgtagtatcaaaaattgttagaacagagaatgaatttgtgtctgtcatgaaagaagcccaagcagatgtcaatagaatgtattggatagaactagttttggaaaaagaagatgcgccaaaattactgaaaaaaatgggtaaattatttgctgagcaaaataaatagtaagctgttttagagaaatttgttcggtaaatattagcctacctacagttgttgtgggtaggctaatattatgaattgagtcctactgaaccaatgattatcgttacgactaaaagtaataaatgtcatcagcaggataggggttgataggaaaagttttttaatcggatggttttcgagttagaggttagggtttctttaggttctctcttctgccgtta

SEQ ID NO: 127 - DNA, 1503 bp, Artificial Sequence
  Synthetic Construct- Sequence No. 127, Example 127: designer Cyanothece sp. ATCC 51142 nirA-promoter-controlled Hexanol Dehydronase DNA construct (1503 bp)
agaaaatctggcaccacacctattaaatctaaaatagctgttttagctaaaatagtcaatagcaagtcttataggtaatcaaacgcaactaaaatgcaaaaaatccataattaaaatgcaaaaaacggatttttaatacaattttgttacattagctacaaaatatctcaaatggtagaggttaaataggtacaactcgaccagatggagggttttccctgtgatggaactcgacctcgacggtcccggggttggtgaagtgctgatcaagtacaccgccgcggggttgtgccattcggacctgcacttgaccgacggggacctaccgccgcgctatccaatcgtcggggggcacgaggggtcaggcatcatcgaggacgtcggacctggggtcaccaaggtcaaaccaggcgatcacgttgtttgcagcttcatcccgaactgcggaacctgtcggtactgcgccaccggacgctccaacctctgcgatatgggcgccaccatcctcgaagggtgcatgcccgacggcagttaccggttccacagtaacggcctggatttcggtgcgatgtgcatgctcggcacattctccgaacgcgcaactatctcccagcattcggtggtcaagatcgacgactggctgccgctcgagaccgcggtggtcgtcggctgcggcgtgccgactggctggggcacctccgtctatgccggcggggttcgttgcggtgacaccaccgtcatctatggcgtcggcggcctgggagtcaacgccgtccaaggcgcggtgagtgcgggcgcgaagtacatcgtggtcgtcgatccggttgcgttcaaacgcgacaccgcgctcaagttcggcgccacccacgcgttcgccgacgccgccaccgccgcggccaaggtcgacgaactgacctggggacagggtgccgatcaggcgctgatcctggtcggcaccgtcgacgaggacgtggtctcggcggcgactgcggtgatcggtaagggaggcaccgtcgtgatcaccggactggcggacccagcaaagctcacggtgcacgtttcgggaacggacctgacgcttaacgagaagacaatcaagggcacgttgttcggctcgtccaatccgcaatacgacatcgtacggctgctccgtctctacgacgccggccagctaaaactcgacgatctgatcaccacccgatacacgctcgaccaggtcaaccagggctaccaggatctgcgagacggcaagaacatccgcggcgtgatcatccacgcctgataagctgttttagagaaatttgttcggtaaatattagcctacctacagttgttgtgggtaggctaatattatgaattgagtcctactgaaccaatgattatcgttacgactaaaagtaataaatgtcatcagcaggataggggttgataggaaaagttttttaatcggatggttttcgagttagaggttagggtttctttaggttctctcttctgccgtta

SEQ ID NO: 128 - DNA, 1149 bp, Artificial Sequence
  Synthetic Construct- Sequence No. 128, Example 128: designer Cyanothece sp. ATCC 51142 nirA-promoter-controlled short-chain Alcohol Dehydrogenase DNA construct (1149 bp)
agaaaatctggcaccacacctattaaatctaaaatagctgttttagctaaaatagtcaatagcaagtcttataggtaatcaaacgcaactaaaatgcaaaaaatccataattaaaatgcaaaaaacggatttttaatacaattttgttacattagctacaaaatatctcaaatggtagaggttaaataggtacaactcgaccagatggagggttttccctgtgatgaaggttgccgtaattactggggcatcccgtggaatcggggaagctatagcaaaggcccttgctgaagatggatattcccttgccttaggggctagaagtgttgataggttagagaagattgccaaggaactcagcgaaaaacatggggtggaggtattttacgactacctcgatgtatcaaaaccagaaagcgttgaagagtttgcaaggaaaacgctagctcactttggagatgtggacgttgttgtggccaatgcggggcttggttactttggtaggcttgaagagcttacagaagagcagttccacgaaatgattgaagtaaaccttttgggagtttggagaacaataaaagctttcttaaactccttaaagcggactggaggagtggctattgttgttacttcagatgtttctgcaaggctacttccatacggtggaggttatgtggcaactaaatgggctgcaagagcattggtaaggaccttccagattgagaatccagatgtgaggttcttcgagctaagacctggagcagtagatacatattttggagggagcaaagctgggaagccaaaggagcaagggtatttaaaacctgaggaagttgctgaggcagtaaaatacctcctaagacttccaaaggatgttagggttgaggaattaatgttgcgctcaatttatcaaaaacctgagtattgataagctgttttagagaaatttgttcggtaaatattagcctacctacagttgttgtgggtaggctaatattatgaattgagtcctactgaaccaatgattatcgttacgactaaaagtaataaatgtcatcagcaggataggggttgataggaaaagttttttaatcggatggttttcgagttagaggttagggtttctttaggttctctcttctgccgtta

SEQ ID NO: 129 - DNA, 1910 bp, Artificial Sequence
  Synthetic Construct- Sequence No. 129, Example 129: a designer Nial-promoter-controlled chloroplast-targeted Phosphoglycerate Mutase DNA construct (1910 bp)
agaaaatctggcaccacaccatggtagggtgcgagtgaccccgcgcgacttggaagggttcaaacgaccccgccgtacgaacttttgtcggggggcgctcccggatggtagggtgcgagtgaccccgcgcgacttggaagggttcaaacgaccccgccgtacgaacttttgtcggggggcgctcccggatggccgccgtcattgccaagtcctccgtctccgcggccgtggctcgcccggcccgctccagcgtgcgccccatggccgcgctgaagcccgccgtcaaggctgcccccgtggctgccccggctcaggccaaccagatgactcgtgtcatcattgtgcgtcatggtcaaagtacatataatgttgaacgacgtatccaaggacgtactgatgcgtcaactttaacggataaaggtcggagcgatgctggtaaagtgggtaaagccctgagtaatatagcatttacagcaatatatagcagtcctctcaaccgagcgaagacgacagcggaaattattcgcagtgagttggttgaacattcgtccgtgattcaggtttctgaacatctggttgaagtagatttacctttgtgggcaggaatgttatctcttgatgtgaaagagaagtttcctgatgactatagtatttggaaaaaacgtccccacgaattgcatatgattgtcagtgacgcacacgggacacgagaacttttcccagttctggctttatatgaacaagccaagcagttttggcaagaaatgttatctcgtcatcaaggggaaactattctcattgttggacataatggtattaaccgcgctctgattagtacggctttgggtattcctcccagtgtttatcacggactacaacagtctaattgcgcgattagcgttttaaattttgcgggtggtttgggtgatacggttcagctagattcaatgaatcagacgcaacatttggaagatactttacccactttgcgaccaaatcatcaaggatttagattattattagtacgtcatggggaaacagaatggaatcgtcaaggtaagtttcaaggccaaattgacgttcctctgaatgataatggcagagcgcaagcaggaaaaactggggagtttctccaagaggtggcgcttgattttgcttttagtagcactatggcgcgtccaaaagaaacagcggaaattattcttcagaagcatgctgatataaagttggaattactagatggtttacgggaaatcagtcacggcagttgggaaggcaagtttgagtcagaaatagaacaagagtttcccggagtgttggaacgctggcgtactgtacctgctgaagtacaaatgccgcaaggggaaaatttacaacagctatgggaacgtagtgtggctgcttggcagtcaatattacaatcggctgaggtaaatcaatggcaaattgggttggtagtggctcacgatgctactaataaaactttactctgcaatatcttgggtttatctccagaaaatttctggaatttccgtcaaggtaatggggcagttagtgttattgactaccctttaggcgctagtggtttaccagtactgcaagcgatgaacattactagtcatttgagtggtggtgtattagataaaacggcagcaggagcattgtagtaaatggaggcgctcgttgatctgagccttgccccctgacgaacggcggtggatggaagatactgctctcaagtgctgaagcggtagcttagctccccgtttcgtgctgatcagtctttttcaacacgtaaaaagcggaggagttttgcaattttgttggttgtaacgatcctccgttgattttggcctctttctccatgggcgggctgggcgtatttgaagcggttctctcttctgccgtta

SEQ ID NO: 130 - DNA, 1856 bp, Artificial Sequence
  Synthetic Construct- Sequence No. 130, Example 130: designer Nial-promoter-controlled chloroplast-targeted Enolase DNA construct (1856 bp)
agaaaatctggcaccacaccatggtagggtgcgagtgaccccgcgcgacttggaagggttcaaacgaccccgccgtacgaacttttgtcggggggcgctcccggatggtagggtgcgagtgaccccgcgcgacttggaagggttcaaacgaccccgccgtacgaacttttgtcggggggcgctcccggatggccgccgtcattgccaagtcctccgtctccgcggccgtggctcgcccggcccgctccagcgtgcgccccatggccgcgctgaagcccgccgtcaaggctgcccccgtggctgccccggctcaggccaaccagatgcttaggtcctaaaccaacagtaccagcataaacagcgcgatcgcctaattcatcttcaattctgagtaaacgattgtattttgctacccgttcactacgacaaagagaaccagttttaatttgacctgcacgagtggctacagccaaatcagcaatagttgtatcctcagtttcaccagaacgatggctaatgactgagcggaaaccgttgcgagtagctaaatcaatagtttccaaagtttcagtcagtgaaccaatttgattcaacttaatcaaaatcgagttacctgctttttgctcaatccctttttgtaaccgagtagcgttagtaacaaataaatcatcacccaccaactgtactcgtgaacccaacttctgagtcagtaattgccaactttcccaatcttcctcatgtaaaccatcttcaatggaaacaatcggatattggtcaaccaactggcctaaataatcaataaactcaactgggctatggggtttaccatcataaacatactgcccatttttgtaaaactcactcgctgccacatccaaggctaaagcaacttcttccccaggcttgtaaccagcttgtttaatagcagctagcaataattctaaagctacttggttagagtccaggttaggtgcaaaaccaccttcatcaccaacaccagtcagcaaacccttatcatccaaaaccttgctgagagttgcaaaaacttccgcaccccaacgcaaagcttcctggaaggaaggcgcactgacgggtacaatcataaactcctgaaaatcgacattattggctgcgtgcgctccaccattgatcacattcatcaaaggtacaggtagcaaatttgctaaaggcccacccacatagcgatacaaaggaattcccaaagactcagcagcagctttagcagctgctagtgaaaccgacaaaattgcatttgcgcccaaattagctttattgggtgaaccatccaaagagatcatgattttatctaatgattcttggtctagggcatccaagcctaacaattggggtgctaatacctctttcacattctgcactgccttgagtactcctttgccaccataacggcttttatcaccatctcgcagttcatgagcctcaaaagtacctgtggaagcaccgctaggaacttgcgctagtcctactgtaccattagccaaatgtactgcagcctcaacagtcggtcttccccgtgaatcaagaatttcgcgggcgataatagcttcaatagcggtatccagaaattttgtcattaaatggaggcgctcgttgatctgagccttgccccctgacgaacggcggtggatggaagatactgctctcaagtgctgaagcggtagcttagctccccgtttcgtgctgatcagtctttttcaacacgtaaaaagcggaggagttttgcaattttgttggttgtaacgatcctccgttgattttggcctctttctccatgggcgggctgggcgtatttgaagcggttctctcttctgccgtta

SEQ ID NO: 131 - DNA, 1985 bp, Artificial Sequence
  Synthetic Construct- Sequence No. 131, Example 131: designer Nial-promoter-controlled chloroplast-targeted Pyruvate-Kinase DNA construct (1985 bp)
agaaaatctggcaccacaccatggtagggtgcgagtgaccccgcgcgacttggaagggttcaaacgaccccgccgtacgaacttttgtcggggggcgctcccggatggtagggtgcgagtgaccccgcgcgacttggaagggttcaaacgaccccgccgtacgaacttttgtcggggggcgctcccggatggccgccgtcattgccaagtcctccgtctccgcggccgtggctcgcccggcccgctccagcgtgcgccccatggccgcgctgaagcccgccgtcaaggctgcccccgtggctgccccggctcaggccaaccagatgaaacccttaaattttcggactaaaattgttgctactatcggtcctgcgagtaatactcccgaagtattacgtcaaatgctcttagccggagtcaatgttgcgcggttgaatttttcccacggtagctacgaagatcacgctcagatggttaaactcttacgttctttgtccgaagaattagacttacccctgaccattttacaagaccttcaaggtccaaaaattcgggtaggcaaattacccccagacggacttaacctcatcgaaggacaatctctaaccttggttccccttgctgcttggaaaaatcaagccaataccgttggcattgattatccctacgtcgctgaagaagcgcaacccggtactcaagtgctgcttgatgacggtttattggagttaaccgttgaacaagtcaagggaaatgaggtcatctgtcaagtggttgaaggaggcattctcaaaagcaataagggggttaatttgccaaccctcaatctacgcttgccttccatgaccgaaaaagataagaaagatctcgaatttggactatcccaaggcgttgacatcatttccctaagctttgtccgcaaacccgaagatattcaagaactcaaggaatttattgcccaaagatcggcaaaagttcccgttttagcgaaaattgaaaagccccaagccgttgacaatattgaagccattatcgatgaatgcgatgctattatggttgcgcggggagacttaggggtagaaatgcgccccgaaaaggttccaggtatccaaaaacgcatcattaagctgtgtaaccaaaaaggcatccccgttattaccgccacccagatgctcgatagcatgattcgtaacccccgtcccacccgtgctgaagccagtgacgtagccaatgctatcattgatggaaccgatgcggttatgttatcaggagaatcagcgatcggagattatcccgtgcaagcggtgcaaatgctggctaatattgccaaagatattgaaccaggactgaattttgccaattatcctcctcgacggcagaataaagcccacgccatagccgaagctctcaataccatcgacaagattcttgatttacaatgtattgtcacctttacggaaaccgggtattctgctaaattagctgctgctgaacggccacgggttcccatagtggctttaacacctgatcaccaagtttatcatcgccttaatttagtttggggagtccgacccattttatttgactacgatgagtcttccctagacgacttgatggttaaagtagaagatatgttaaaaacccgaaactacgcgacatcaggggataaagtgttgattatgggtggtttacccctcagaaaagccagtaccacgagttttctcgatattcatacgattacttaataaatggaggcgctcgttgatctgagccttgccccctgacgaacggcggtggatggaagatactgctctcaagtgctgaagcggtagcttagctccccgtttcgtgctgatcagtctttttcaacacgtaaaaagcggaggagttttgcaattttgttggttgtaacgatcctccgttgattttggcctctttctccatgggcgggctgggcgtatttgaagcggttctctcttctgccgtta

SEQ ID NO: 132 - DNA, 1568 bp, Artificial Sequence
  Synthetic Construct- Sequence No. 132, Example 132: designer Nial-promoter-controlled NADPH-dependent chloroplast-targeted NADPH-dependent Glyceraldehyde-3-phosphate dehydrogenase DNA construct (1568 bp)
agaaaatctggcaccacaccatggtagggtgcgagtgaccccgcgcgacttggaagggttcaaacgaccccgccgtacgaacttttgtcggggggcgctcccggatggtagggtgcgagtgaccccgcgcgacttggaagggttcaaacgaccccgccgtacgaacttttgtcggggggcgctcccggatggccgccgtcattgccaagtcctccgtctccgcggccgtggctcgcccggcccgctccagcgtgcgccccatggccgcgctgaagcccgccgtcaaggctgcccccgtggctgccccggctcaggccaaccagatgtcaacgaatattgcaattaatggaatgggtagaattggaagaatggtgctaagaatagcactaaagaatgaagcattgaatgtagttgccatcaatgctagctatcctcctgaaacaattgcacatttaattaattatgacacaacacatgggagatacgataaaagagtagaacctattgaaagtggaattcgagtggaaggccatgatattaaattagtgtctgatagaaacccagaaaatttaccctggaaagatttagaaatagatatcgtcattgaagcgaccggtaaatttaaccatggtgataaagctaaggcacatattcaagcaggagctaaaaaagtgttattgacaggaccatcaaaaggcggaaaagtacagatggtggttaaaggtgttaacgatcaagacttagatacagatacatatgacatatttagtaatgcgtcgtgtactacgaattgtatcggaccagttgcaaaagttttaaatgatagttttggcattgaaaatggcttaatgacaacggtacatgcaattacaaatgatcaaaataatatagataatccgcataaagatttgagaagagcgcgttcttgtggggaaagtattataccaacatcaacaggtgctgctaaagcattaaaagaagttatgccagaattgaatggcaaactacatggcatagcacttcgtgtgccaactcaaaatgtatcattagttgatttagtcattgatttaaaacaaaaagtgacagtagatgaagttaatcatgcatttagagatgcaaacttacaaggaattattgatgttgaagaggcccctctagtttctaaggactataatacaaatcctcattcagcagttatagatgctaaaaatacaatggtcatgggagataataaggttaaagttatagcctggtatgataacgaatggggatattctaatagagtagttgaggtagcaaatcaacttggagaactaattaaataataaatggaggcgctcgttgatctgagccttgccccctgacgaacggcggtggatggaagatactgctctcaagtgctgaagcggtagcttagctccccgtttcgtgctgatcagtctttttcaacacgtaaaaagcggaggagttttgcaattttgttggttgtaacgatcctccgttgattttggcctctttctccatgggcgggctgggcgtatttgaagcggttctctcttctgccgtta

SEQ ID NO: 133 - DNA, 1571 bp, Artificial Sequence
  Synthetic Construct- Sequence No. 133, Example 133: designer Nial-promoter-controlled chloroplast-targeted NAD-dependent Glyceraldehyde-3-Phosphate Dehydrogenase DNA construct (1571 bp)
agaaaatctggcaccacaccatggtagggtgcgagtgaccccgcgcgacttggaagggttcaaacgaccccgccgtacgaacttttgtcggggggcgctcccggatggtagggtgcgagtgaccccgcgcgacttggaagggttcaaacgaccccgccgtacgaacttttgtcggggggcgctcccggatggccgccgtcattgccaagtcctccgtctccgcggccgtggctcgcccggcccgctccagcgtgcgccccatggccgcgctgaagcccgccgtcaaggctgcccccgtggctgccccggctcaggccaaccagatgtaaactggctgaatgtacaagcatatccgcaagtttgttggagtaacccatttcgttatcgtaccatgaaactactttcacgaaatttggagataacataattcccgcatccttgtcgaataccgaagttctcttctcgcccacgaaatcctgagaaaccacagcgtcttcagtataccctaaaattcctttaagttcaccttccgatgccgctttcattgctgcacagatttcttcgtatgaagtagatttctctaatctgaccgttaaatccactacagaaacatctgcagttgggactctgaatgacataccggttaatttaccgttaagggcaggaattacttttcctactgcttttgcagctccggtagaagatgggatgatgttgttcaatgcagaacgcccgcctctccagtctttcatagaaggcccgtcaacagttttctgggttgcagtagttgcgtgcacggtcgtcattaaaccttcgatgattccgaaattatcgtgaagtacttttgctaatggagcaagacagttagtcgtacagctcgcgttagaaaaaatagtaacgtcatctgtaagatccttgtggttaacacccattacgaacatcggcgtatcgtcttttgaaggagcagaaaggattgctttttttgcacccgcgttgatatgtgcctgtgccgcctccttggtaaggaataaaccggttgattccacgatgtattctgcgcctacttcgttccatttcaggttgttaggatctttttcggcggttacacgaatctttttgccattcacgataaggtcgtttccttctacagaaacttcgcccgcaaatgtgccgtgtaccgagtcatacttaagcatgtacgccatatatttggcatcgataagatcgttaattcccaccacttcgatgttttctctctcggccatcgctctgaaaaccaagcgtccaatcctaccgaatccgttgattcctactttaattgttgacattaaatggaggcgctcgttgatctgagccttgccccctgacgaacggcggtggatggaagatactgctctcaagtgctgaagcggtagcttagctccccgtttcgtgctgatcagtctttttcaacacgtaaaaagcggaggagttttgcaattttgttggttgtaacgatcctccgttgattttggcctctttctccatgggcgggctgggcgtatttgaagcggttctctcttctgccgtta

SEQ ID NO: 134 - DNA, 2150 bp, Artificial Sequence
  Synthetic Construct- Sequence No. 134, Example 134: designer Nial-promoter-controlled chloroplast-targeted Citramalate Synthase DNA construct (2150 bp)
agaaaatctggcaccacaccatggtagggtgcgagtgaccccgcgcgacttggaagggttcaaacgaccccgccgtacgaacttttgtcggggggcgctcccggatggtagggtgcgagtgaccccgcgcgacttggaagggttcaaacgaccccgccgtacgaacttttgtcggggggcgctcccggatggccgccgtcattgccaagtcctccgtctccgcggccgtggctcgcccggcccgctccagcgtgcgccccatggccgcgctgaagcccgccgtcaaggctgcccccgtggctgccccggctcaggccaaccagatggagcaggtttttatctacgacaccaccttgagggatggctcgcaggcagaaggtataaacttttccgtagaggataagatgcgcatacttcaaaaactggacgaatttggagtgcattacatagagtgcggatggcccggtgcgaacccaaaagacactattctctttgaaaggctgagaaagataaaaactcaaaatgccaaaatagtagcctttggtgcaacaagaaaagctggaaagaaggcgcacgaagataagcaggtggaaaaccttttgaaatcgggtgccaaggtgataaccgtatttggcaagagctgggactttcatgtaacgcatgccatagggaccaccttagaggaaaacctggacatggtttacgagacggtaagctatcttaaaaagcatgtggaggaggttatctttgacgcagagcacttctttgacggatacaggcacaacgaaagctatgcttttaaggtattggaggcagcttttcaggcaggtgcggactggatagtcctctgcgataccaacggtggcacccttcccaatgaggtttatgagataaccaaaaaggttgtacaaaagtttccacaggcacgcgtaggcatacacgctcacaacgattcagatactgctgtggctaactctcttatggcggtgcttgcaggtgcaaggcaggttcacggcactataaacggcttgggggaaagaacgggcaatgctaatctgtgttccataatacctaaccttcagctcaagctgggctttagtgtagtgccttcccaaaacctcaaaaagctcaccgagcttgctcactttgtctccgaaatctccaacacgccactgcccaaaaacatgccttatgtaggggagagtgcttttacccacaaagcaggcgtacacgcctctgcagttatgaaaaggtcagaaacatacgaacacatagacccttctttggtaggaaacagaaggaaggtgacagtgtctgacctttctggaaggagtaatatactttacaagctcagggaaatggggcttgaggtggatgataagtcccctgagcttatcaaactccttgaaaagataaaggaacttgagaaggaaggctaccactttgaagcagctgaagcttcttttgagcttctttgcaagaggcattttgggcttgttaaaaactattttgaccttgatgcttacagggtgctaatagccagaaggagtacagacctatctcctgtttcggaagccaccgtaagactctatgtggaagacataaaggagcatacagcagctcttggtaacggaccagtgagcgcccttgacagagccctcagaaaagccttggaagagttttatccaagccttaaagatgttcagctcatagactacaaggtgagaatagttaacgaatcggagggtacatctgccaaagtgagggtgcttatagaatctaccgatggtagaagaaagtggggaacggtgggagtttcggaaaacataatagaagcctcttggatagccttaactgatagcctcgtatataaactcttaaaagacgaagaagagggtataatgtgataaatggaggcgctcgttgatctgagccttgccccctgacgaacggcggtggatggaagatactgctctcaagtgctgaagcggtagcttagctccccgtttcgtgctgatcagtctttttcaacacgtaaaaagcggaggagttttgcaattttgttggttgtaacgatcctccgttgattttggcctctttctccatgggcgggctgggcgtatttgaagcggttctctcttctgccgtta

SEQ ID NO: 135 - DNA, 3125 bp, Artificial Sequence
  Synthetic Construct- Sequence No. 135, Example 135: designer Nial-promoter-controlled chloroplast-targeted 3-Isopropylmalate/(R)-2-Methylmalate Dehydratase large/small subunits DNA construct (3125 bp)
agaaaatctggcaccacaccatggtagggtgcgagtgaccccgcgcgacttggaagggttcaaacgaccccgccgtacgaacttttgtcggggggcgctcccggatggtagggtgcgagtgaccccgcgcgacttggaagggttcaaacgaccccgccgtacgaacttttgtcggggggcgctcccggatggccgccgtcattgccaagtcctccgtctccgcggccgtggctcgcccggcccgctccagcgtgcgccccatggccgcgctgaagcccgccgtcaaggctgcccccgtggctgccccggctcaggccaaccagatgtaccatgtctgctgttgctatctcgcccttgattgctgatgctgtaacagtagccgctgaagcaagatatacaaaagaatctttatgtcctgcacgtcccttgaagtttcgtgtacctgtactgataagagtctcaccctcaccgataacaccctgacagcttccccagcatacagagcagttaggattcataacaattgcacctgcgtccatgaatatatcaaggagtccctctttcatagcctgaagatataccgaacggcttgcaggaactacaaggaatcttaccttaggagcaacctttttccctttgatgatcgctgcgccaactcttaaatcctcgattcgtccattgttacatgaaccaagaaatgcttcatcaatctttacaccaagtgattccttagccggaactacattgtcaacaaaatgtggctttgcaacaattggctgtattgttgaaaggtcaatatcataaacctgctcaaatactgcatcatcatctgatgtaaagcatgcctttggctctctgccatgctccttaagataatccattgcaacatcatcaacttccatgagtgcagtcttagcacctgcctctacacaaaggttacagattgatattctgtctgccattgaaaggctgtgtaagccttctcctgcaaattccattgctttatagttagcaccgttagcgccaatctttccaataatagagagtattaaatctcttgcatatactccatcgttaagctttcccttaaggttgaatcttaatgttcccggaaccattacccatgatgttcctgtaaccattgcatacaaataatctgtacaaccaacacctgtaccaaatgcacctaacgcaccatatgcacaagtatggctgtctgctccaaatataagctcacccggcactacatgattttccatcataacctgatgacacacaccctcgccctcgtagaacttaatatcattagccttagcaaagtctctcatcttcttctgtgaggctgctgtcttaggactgtctgatggaatattgtggtctacaatccatacaagcttatccttgtcagcaatatgaggattctttaacttctcatacataccaatagtaagatgtgttgttccatcattactcataagtctgtcaagagtaacagttgcaatatcaccagccttaacctgtgaaagacctgctgcccttgcgataatcttctctgcaatagtcatgccatgctttgcctcatctgcaggtacggctgtactctcagactcttctttctcaccatcaagtgatgcaataagaccaccctgattaagaatagcctgcatcttggctggaagcttagtacatgtataagtctttccattaacagttataattccatcttctaatgaaagctcacattcatcccccgcattaacttcgtcatggagttctttacatacaataacaggaagtcctatattaatagcattacgatagaatattcttgcaaatgatttggcaatcactgccttgacacctaatgccttaagtacgcttggtgcctgctctcttgatgaaccacatccaaagttgtcatctgcaacaacgaaatctcccggctttacggcagaagcaaaatcagagtctaatgattcaaatgtatgactcttcatctcatcaattgtcggaaacaaaagatactgcgatgcaataatctgatctgtatcaacatctttatcaaacttaaatatcctacccatatggtagggtgcgagtgaccccgcgcgacttggaagggttcaaacgaccccgccgtacgaacttttgtcggggggcgctcccggatggtagggtgcgagtgaccccgcgcgacttggaagggttcaaacgaccccgccgtacgaacttttgtcggggggcgctcccggatggccgccgtcattgccaagtcctccgtctccgcggccgtggctcgcccggcccgctccagcgtgcgccccatggccgcgctgaagcccgccgtcaaggctgcccccgtggctgccccggctcaggccaaccagatggtcaagaccgttaagctttctcattgccttaacaagtccgcctgcattaagtatatccacaagattatcaggaagtgaagcaataggatatgcttttccattgtgtgtaatctttgcatttacttcaacatcaatagtatcgccttccgtaacttcgtcgtgaaggtctgcattctctataaggagaagtccgttattaatagaatttctgaagaatattcttgcatatgatttggcaataacacatttaatacctaatgccttaataacctcaggtgcctgctctcttgatgaaccacaaccaaagttctttcctgcaacaatgatgtcgcctggcttaatctgacctgcaagttctggtcttaatggcgaaaatgcatatggtttcatatcttctactgtctttaatgcaaggtactctgtagggataatgatatctgtatcaatgtcatcaccaagtacccatactttaccgctaaatttctcgttcattaaatggaggcgctcgttgatctgagccttgccccctgacgaacggcggtggatggaagatactgctctcaagtgctgaagcggtagcttagctccccgtttcgtgctgatcagtctttttcaacacgtaaaaagcggaggagttttgcaattttgttggttgtaacgatcctccgttgattttggcctctttctccatgggcgggctgggcgtatttgaagcggttctctcttctgccgtta

SEQ ID NO: 136 - DNA, 2879 bp, Artificial Sequence
  Synthetic Construct- Sequence No. 136, Example 136: designer Nial-promoter-controlled chloroplast-targeted 3-Isopropylmalate Dehydratase large/small subunits DNA construct (2879 bp)
agaaaatctggcaccacaccatggtagggtgcgagtgaccccgcgcgacttggaagggttcaaacgaccccgccgtacgaacttttgtcggggggcgctcccggatggtagggtgcgagtgaccccgcgcgacttggaagggttcaaacgaccccgccgtacgaacttttgtcggggggcgctcccggatggccgccgtcattgccaagtcctccgtctccgcggccgtggctcgcccggcccgctccagcgtgcgccccatggccgcgctgaagcccgccgtcaaggctgcccccgtggctgccccggctcaggccaaccagatgaatgaactgccttacatcagaaacttttccattaaccgccgccgccactaccatcgctggactcatcaataaagtgcgaccggttgatgacccctgacggcctttaaaattacggttagaagaagaagcactaatttgatcgccaactaacttatcagggttcatggctaaacacatggaacagccggcttctcgccattcaaacccggcttgggtaaaaattttatcgagtccttcggcttctgcttgttgtttaaccctttccgatccgggaacgacaaatgctttaacccctgatgctacctgtcttccttgggcaaatttagccgcttctcgtagatcgctgatgcgtccattggtacaactaccaataaaacagacatcgacaggagtccccataataggcgatccgggtttgagttgcatatattcataagcttcttgagcaataaagcgatcgccttctggtaaactttcaggagtaggaaccacttcagtcacgcctattccttgaccgggggtaataccccaagtaacagtcggttcgatctcaccggcatcaaacaccacgacatcatcatattgggcattcgcatcactgcggatactcttccaccattcgacggccttatcccagtcttggcctttgggagaaaagtctctgcctttgaggtattcaaaagtcacctcatcagggttaatatagccgcatctagcgccgccttcgatggccatattacaaacggtcattcgttcttccatcgacatggcctcaaaggtagtgccggcatattcataagcgtaacctacgccgccttttacccctaatttgcggatgatgtgcaggacgacatctttggcatagactccggggggtaaggttccgttaacttcaattttacggactttgagtttagagagggctagggtttgggtagcgaggacatctcgcacttgggaggttcctatgccaaaagcgatggccccaaaagcgccatgagtggaggtatgagagtcaccgcaagcaatggtcattccgggttgagttagtccttgttcgggggcgatcacatgaacaataccctgatttcctgagccgatattataaaaagggatattattatctttagcattagtttcaatagcccgcatcatttcttcagcgaggtcgtctacaaagggacggtgttggttctcggtgggtacaatatgatccactgtggcgacggtgcgatcggggaataataccttcagttttctgtcccgtagcatagcaaaagcttgtggactggtaacttcatgaatgaggtgaagtcctataaatagttgggtttgtcccgatggtaagatgcggacggtatgtaagtcccaaactttgtcaaacagtgttcctgtactcatatggtagggtgcgagtgaccccgcgcgacttggaagggttcaaacgaccccgccgtacgaacttttgtcggggggcgctcccggatggtagggtgcgagtgaccccgcgcgacttggaagggttcaaacgaccccgccgtacgaacttttgtcggggggcgctcccggatggccgccgtcattgccaagtcctccgtctccgcggccgtggctcgcccggcccgctccagcgtgcgccccatggccgcgctgaagcccgccgtcaaggctgcccccgtggctgccccggctcaggccaaccagttatacctctacggcatttttccaatttaaataaggtaattttttagcagtttcttgaatttcagaaaggttttgaatgagttgtccgcagctatcccaagagccttcaattaacatttgtctagacccttctcccatgctaacatcagcaacaaattcgccacattgcactttcatagcggctaaatctaaactgagggacaaggcaggattttcttgcaggagagattgtattttttctacggtttcaggagaagctgtcacacagggaaccccgttagcaatacaattgccaaagaaaatttcagcaaaactttcaccgataattgctttaattccccaacgaataatggcttgtggggcgtgttctcttgaagatccacagccaaaattagcgttaactaccaagagattagctccctgatattgcggcagatcaaagggatgttttccttgcatctgttggcgatcatcaataaaaacttgttctcctaagccttcaaaggtgacgcaacgtagaaaccgcgcaggaataatacgatcagtatcgatatcatcgcccactaaagggatacctcgtcctgaaatttgggtgacttgactcattaaatggaggcgctcgttgatctgagccttgccccctgacgaacggcggtggatggaagatactgctctcaagtgctgaagcggtagcttagctccccgtttcgtgctgatcagtctttttcaacacgtaaaaagcggaggagttttgcaattttgttggttgtaacgatcctccgttgattttggcctctttctccatgggcgggctgggcgtatttgaagcggttctctcttctgccgtta

SEQ ID NO: 137 - DNA, 1661 bp, Artificial Sequence
  Synthetic Construct- Sequence No. 137, Example 137: designer Nial-promoter-controlled chloroplast-targeted 3-Isopropylmalate Dehydrogenase DNA construct (1661 bp)
agaaaatctggcaccacaccatggtagggtgcgagtgaccccgcgcgacttggaagggttcaaacgaccccgccgtacgaacttttgtcggggggcgctcccggatggtagggtgcgagtgaccccgcgcgacttggaagggttcaaacgaccccgccgtacgaacttttgtcggggggcgctcccggatggccgccgtcattgccaagtcctccgtctccgcggccgtggctcgcccggcccgctccagcgtgcgccccatggccgcgctgaagcccgccgtcaaggctgcccccgtggctgccccggctcaggccaaccagatgactcggcaacaccgcataaccctacttcctggcgatggtatcggacctgaaattttagccgtaaccgtagatgtcctaaaggtgataggcaaacaattcgacctaaattttgagtttacagaagccctcatcggcggtgctgccattgatgcaaccggaaaccccttacccgaagaaaccttaaagatttgtcgcaacagtgatgcagtgcttttagccgccatcgggggttataagtgggataatttgccccgtcatcaacgcccagaaacgggattattaggcatcagagccggcttaggattatttgctaacttacgtccggccaccattttaccgcagttaatcgacgcttccaccctcaaacgagaagtcgtcgaaggcgtggacattatggtggtgcgagaactcaccggcggcatttattttggtcaaccgaagggaatttttgagacagaaagcggcgaaaaacggggcgtgaataccatggcctatacagaatcagaaatagaccgcattgctcaaatcggctttgaaacagcccaaaaacgtcgaggaaagctctgttctgtggataaagccaatgtcttagatgtctcccaattatggcgcgatcgcgtaactttaatggccgaaaaatacccagatgtagaactgtctcatctctatgttgacaatgcggctatgcagctagtgcgtaacccaaaacaatttgataccatcgtcaccggcaatttatttggcgatatcctctcggatgcagccgctatgttaaccggtagtattgggatgttaccctctgctagtttaggttcagatggacccggactatttgaaccggtacatggttcagcccccgatattgcaggacttgataaagctaacccgcttgctcaggtactcagtgccgccatgatgttgaaatatggcttaaatgagccagaagccgccgatcaaatcgaacaagcggttttagccgtattagaaaaaggctatcgtacaggagacatcatgtcagaaggaatgacgttagtgggatgtaagggcatgggagaagttttgattaatgtcttagaatctttacaagggtgataaatggaggcgctcgttgatctgagccttgccccctgacgaacggcggtggatggaagatactgctctcaagtgctgaagcggtagcttagctccccgtttcgtgctgatcagtctttttcaacacgtaaaaagcggaggagttttgcaattttgttggttgtaacgatcctccgttgattttggcctctttctccatgggcgggctgggcgtatttgaagcggttctctcttctgccgtta

SEQ ID NO: 138 - DNA, 2174 bp, Artificial Sequence
  Synthetic Construct- Sequence No. 138, Example 138: designer Nial-promoter-controlled chloroplast-targeted 2-Isopropylmalate Synthase DNA construct (2174 bp)
agaaaatctggcaccacaccatggtagggtgcgagtgaccccgcgcgacttggaagggttcaaacgaccccgccgtacgaacttttgtcggggggcgctcccggatggtagggtgcgagtgaccccgcgcgacttggaagggttcaaacgaccccgccgtacgaacttttgtcggggggcgctcccggatggccgccgtcattgccaagtcctccgtctccgcggccgtggctcgcccggcccgctccagcgtgcgccccatggccgcgctgaagcccgccgtcaaggctgcccccgtggctgccccggctcaggccaaccagatgtgatgctgtaacagccgcttgttctttttgggttttttcttgttctagggcaacataaagacggttaagagcgctaatataagcccgtgccgaagcaacgataatatcagtattagcggcatgacccgagaaagttcggttttcgtatttcagacgaatggtgacttctcccattgcatcaatgccttctgtgactgacttaaccgaaaattcaatcaactggttaggaacattaaccactcggttaatcgctttataaaccgcatctacgggtccggttccaatagccgcatccattaattcttcgccgttgggaccttttaagatcacggttgctgttggacgggcctgatcgccacatgacacttgtactaattcgagacggaagatttctggggcaacatgaatttcatcattgacgatggcttctaagtcccagtcagtaatttctttgcgcttgtctgccacttctttaaagcgtacaaaggctttatttagctcagtttccgtcaattcaaagcctaattcttttagacgagtgccgaaagcattacgccctgagagtttcccgaggacaatttgattattggttaacccgatagactcagcgtccataatttcgtaggttaatttattttttagcacgccatcctgatgaataccggattcatgagcgaaagcattagcgccgacaattgccttattcggttgtaccgccatcccggtgagactggaaactaaacgggatgttttgtagatttctttggtattgatattggttaggggttcagtggagtctgctggtcgtcctaagaaaggattgtaataggagcggcgtacatgaagcgccatcactaattcttctaaggcggcgttgccggctcgttctcctatgccgttaatagtacattctaactgtctggctccatttttaacggcttcaaggaagttagccaccgctaaccctaaatcattatgtccatgaaccgagataatagcattgtctatgttaggaacattttctttgatgccgcgaatcaattgaccaaattcagagggagttaaatagcctacggtatcgggaatattaacggtagttgctccggctgctatggctctttctaatacttgatacaaaaattctgggtcactacggcctgcatcttctggggaaaattctacatcatctacaaaagacttcgcataagccaccatttctgggacgatttctaggacttcttgacgagtctttttgagtttataggccaagtgaatatcggaggtagccaaaaaggtatgaatgcggggtttagcggcgggtttgagggcttctgcggctttagtgatatcttgtcgagtggctcttgccaagccgcaaattgtggggcctccttggactcctactactttagcgattttttgtacagcttcaaaatctccgggacttgcgtaaggaaaacccgcttctatgacatctactcccagtcgtgccagtgcgcgagcaacggttagcttctcatcaacattcagggttgctcccggggactgttccccatctcggagagtggtatcgaagatgataacgcgatcgggttgtttactcattaaatggaggcgctcgttgatctgagccttgccccctgacgaacggcggtggatggaagatactgctctcaagtgctgaagcggtagcttagctccccgtttcgtgctgatcagtctttttcaacacgtaaaaagcggaggagttttgcaattttgttggttgtaacgatcctccgttgattttggcctctttctccatgggcgggctgggcgtatttgaagcggttctctcttctgccgtta

SEQ ID NO: 139 - DNA, 2882 bp, Artificial Sequence
  Synthetic Construct- Sequence No. 139, Example 139: designer Nial-promoter-controlled chloroplast-targeted Isopropylmalate Isomerase large/small subunits DNA construct (2882 bp)
agaaaatctggcaccacaccatggtagggtgcgagtgaccccgcgcgacttggaagggttcaaacgaccccgccgtacgaacttttgtcggggggcgctcccggatggtagggtgcgagtgaccccgcgcgacttggaagggttcaaacgaccccgccgtacgaacttttgtcggggggcgctcccggatggccgccgtcattgccaagtcctccgtctccgcggccgtggctcgcccggcccgctccagcgtgcgccccatggccgcgctgaagcccgccgtcaaggctgcccccgtggctgccccggctcaggccaaccagatgcaacaactcccgcacatccgcaacttcaccctgaatcgccgcagtagcgaccatcgccggactcattaacaaagtgcgaccggaagctgatccttgtcgtcctttaaagttgcggttggaggaggaagcactaatttgtctaccttccagcttgtcggggttcatggctagacacatagaacatccaggttcgcgccattcaaagcctgctgcttcaaagattttatctaaaccttcagcttcggcagcttttttcactcgttcggaaccgggaaccacaaaagccttgactccttccgctacgtggcgacctttggcaattttcgcggcttcttgcaggtcactaagtctaccgttagtgcagctaccgataaagcaaacgtcaattttcgttcccttaatcggttgaccaggatataaatccatgtaacggtaagcttcttcagctacaaagcggtcttcttctaggagttcttctggctggggaatcaactgattcacaccaataccttgaccgggggtaattccccaggtaacagtggggggaatatccgcagcgttgaatactattacatcatcgtattcagcatcagcatcactcttgattgattcccaccaagccacggctttttcccaatcagcgccttggggggcaaagtctctaccttggagataatcataggtaacttgatcaggattgacataaccgcatctagcgccaccctcaatggccatgttgcagacagtcatccgttcttccatattcatttgctcaaaagtcgtacccgcgtattcgtaggcgtaacctacaccacctttcactcccagggtacggatgatatgcaggatgacatctttggcataaaccccagggttgagtgtgccgttaacttcaattttacggactttgagtttggatagggataaggtttgggaggcgagaacgtcccgcacttggctagtaccaataccaaaagcgatcgccccaaacgccccatgacttgaagtgtggctatcaccacaggcgatcgtcattcccggctgtgtcagtcccagttctggcgcaatcacatgaactataccttgattgccggaaccaatgttataaaaagtaatgttattttcttgacaattctgctctagggcttggatcatttcctcagccaagcgatcgacaaaaggacgcgcctgattctctgtaggcacgatgtgatccacagtagccacagtccgctcaggaaatagtacctttaaacctcgttcccgtaacatagcaaaggcttgtggactagtaacttcatggactaggtgcaggccaataaatagctgtgttagccctgaaggaagtgtaccaacagtgtgtaagtcccaaactttatcaaacagggtgcctttgctcatatggtagggtgcgagtgaccccgcgcgacttggaagggttcaaacgaccccgccgtacgaacttttgtcggggggcgctcccggatggtagggtgcgagtgaccccgcgcgacttggaagggttcaaacgaccccgccgtacgaacttttgtcggggggcgctcccggatggccgccgtcattgccaagtcctccgtctccgcggccgtggctcgcccggcccgctccagcgtgcgccccatggccgcgctgaagcccgccgtcaaggctgcccccgtggctgccccggctcaggccaaccagatgaccagcagccagtttaccccaactcacataaggtaacttagcagatgttacccgcacttgctcggtgttcgctaccaactgaccgcaagcatcccaagccccagtaataaaggtgcttctggttccttcaccaatggagattggcgcggtgaaatcaccaacttgtacttgcagagtttctaagttgatgctgacattagcttgaggattagcggctactaactcttgcaattgtttaacgatcgcctcatcagcagtgacacaaggtacaccgatggctacgcaattaccgaagaaaatttctgcaaaactttcaccaatcacggattgaatcccccatttagaaagggcttggggtgcgtgttcccgtgaagaaccacagccaaagttgcggttaactatgaggatatttgcgccttgatactgcggttggtcaaaaggatgctccccttttagggctgtgcggtcatcaataaacgcgccttcacgtaacccatcaaaggtaatggctttgagataacgagcaggaataatgcgatcggtatcaatatcattacccactaagggtatgccacgccctgtaacttctttaacttcactgaccattaaatggaggcgctcgttgatctgagccttgccccctgacgaacggcggtggatggaagatactgctctcaagtgctgaagcggtagcttagctccccgtttcgtgctgatcagtctttttcaacacgtaaaaagcggaggagttttgcaattttgttggttgtaacgatcctccgttgattttggcctctttctccatgggcgggctgggcgtatttgaagcggttctctcttctgccgtta

SEQ ID NO: 140 - DNA, 2210 bp, Artificial Sequence
  Synthetic Construct- Sequence No. 140, Example 140: designer Nial-promoter-controlled chloroplast-targeted 2-Keto Acid Decarboxylase DNA construct (2210 bp)
agaaaatctggcaccacaccatggtagggtgcgagtgaccccgcgcgacttggaagggttcaaacgaccccgccgtacgaacttttgtcggggggcgctcccggatggtagggtgcgagtgaccccgcgcgacttggaagggttcaaacgaccccgccgtacgaacttttgtcggggggcgctcccggatggccgccgtcattgccaagtcctccgtctccgcggccgtggctcgcccggcccgctccagcgtgcgccccatggccgcgctgaagcccgccgtcaaggctgcccccgtggctgccccggctcaggccaaccagatgtatacagtaggagattacctgttagaccgattacacgagttgggaattgaagaaatttttggagttcctggtgactataacttacaatttttagatcaaattatttcacgcgaagatatgaaatggattggaaatgctaatgaattaaatgcttcttatatggctgatggttatgctcgtactaaaaaagctgccgcatttctcaccacatttggagtcggcgaattgagtgcgatcaatggactggcaggaagttatgccgaaaatttaccagtagtagaaattgttggttcaccaacttcaaaagtacaaaatgacggaaaatttgtccatcatacactagcagatggtgattttaaacactttatgaagatgcatgaacctgttacagcagcgcggactttactgacagcagaaaatgccacatatgaaattgaccgagtactttctcaattactaaaagaaagaaaaccagtctatattaacttaccagtcgatgttgctgcagcaaaagcagagaagcctgcattatctttagaaaaagaaagctctacaacaaatacaactgaacaagtgattttgagtaagattgaagaaagtttgaaaaatgcccaaaaaccagtagtgattgcaggacacgaagtaattagttttggtttagaaaaaacggtaactcagtttgtttcagaaacaaaactaccgattacgacactaaattttggtaaaagtgctgttgatgaatctttgccctcatttttaggaatatataacgggaaactttcagaaatcagtcttaaaaattttgtggagtccgcagactttatcctaatgcttggagtgaagcttacggactcctcaacaggtgcattcacacatcatttagatgaaaataaaatgatttcactaaacatagatgaaggaataattttcaataaagtggtagaagattttgattttagagcagtggtttcttctttatcagaattaaaaggaatagaatatgaaggacaatatattgataagcaatatgaagaatttattccatcaagtgctcccttatcacaagaccgtctatggcaggcagttgaaagtttgactcaaagcaatgaaacaatcgttgctgaacaaggaacctcattttttggagcttcaacaattttcttaaaatcaaatagtcgttttattggacaacctttatggggttctattggatatacttttccagcggctttaggaagccaaattgcggataaagagagcagacaccttttatttattggtgatggttcacttcaacttaccgtacaagaattaggactatcaatcagagaaaaactcaatccaatttgttttatcataaataatgatggttatacagttgaaagagaaatccacggacctactcaaagttataacgacattccaatgtggaattactcgaaattaccagaaacatttggagcaacagaagatcgtgtagtatcaaaaattgttagaacagagaatgaatttgtgtctgtcatgaaagaagcccaagcagatgtcaatagaatgtattggatagaactagttttggaaaaagaagatgcgccaaaattactgaaaaaaatgggtaaattatttgctgagcaaaataaatagtaaatggaggcgctcgttgatctgagccttgccccctgacgaacggcggtggatggaagatactgctctcaagtgctgaagcggtagcttagctccccgtttcgtgctgatcagtctttttcaacacgtaaaaagcggaggagttttgcaattttgttggttgtaacgatcctccgttgattttggcctctttctccatgggcgggctgggcgtatttgaagcggttctctcttctgccgtta

SEQ ID NO: 141 - DNA, 1724 bp, Artificial Sequence
  Synthetic Construct- Sequence No. 141, Example 141: designer Nial-promoter-controlled chloroplast-targeted NADH-dependent Alcohol Dehydrogenase DNA construct (1724 bp)
agaaaatctggcaccacaccatggtagggtgcgagtgaccccgcgcgacttggaagggttcaaacgaccccgccgtacgaacttttgtcggggggcgctcccggatggtagggtgcgagtgaccccgcgcgacttggaagggttcaaacgaccccgccgtacgaacttttgtcggggggcgctcccggatggccgccgtcattgccaagtcctccgtctccgcggccgtggctcgcccggcccgctccagcgtgcgccccatggccgcgctgaagcccgccgtcaaggctgcccccgtggctgccccggctcaggccaaccagatgggcggcggcttcgagtatctgacggctgacgtcaagggtaatatcgccgttttcacccagatgggtcatgccgtggtcctccaactgctgcaccaggtcggtaatgccttgcgcaccgatgtcataggcggacaggcgggtcggcacaccaaggttttcaaagaattcctccgtcttgcggataaccgcattgatccgctcatcttccgttccatcggtcaggttccatacccgtactgcatactgaagcagtttggcacgcttttcctcgcgacgcaccttcagcagggcaggaaataccatggccagcgtccgggcgtggtcaatgtggtattttgccgtgatttcgtggccgatcatatgcgtgctccagtcatgtggcacccctgcgccgatcaggccattaagcgccaatgtcgccacccacatgaggttggagcgcaggtcataatcatcgggtgccgccatgatacgtggcccgatttccacaaggctggagagcagcccttcggaaaagcgatcctgcgccattccgtccacaggataggtcatgtactgttccatcacatggacgaaggagtccacaacaccgttgataacctgcttcatcggcaggctcatggtgcgtgtcgggtcaagcacggaaaagcgtggatagaccaggggattggaaaacaggagcttatccccagtggactgccgtgaaatcacgctcatgcagttcatttcagaccccgtggcaggcagggtgaccaccgtgcccagtggcagggccttggtcgcggctgtgcctttgctggtcaggatgtcccatgcctcaccttcatatgggacagcggcagcgacgaacttggtcccatccatgacagagcccccacccacggcaagcaggaagtcgagcccttcttcacgcaccatggttacggccttcatcagggtttcataggtgggattggcctcgatgccaccgaattcccgaaaggtccggctaccgagggcggcgcgtacctcggcaagcgtcccgctgcgctcggcgcttgaaccgccatacaggacgaggacacgggcctggggtgacaactgatcatctagacggccaatcatgcctttgccgaacaggacacgtgttgggttatagaattcgaaattctgcattaaatggaggcgctcgttgatctgagccttgccccctgacgaacggcggtggatggaagatactgctctcaagtgctgaagcggtagcttagctccccgtttcgtgctgatcagtctttttcaacacgtaaaaagcggaggagttttgcaattttgttggttgtaacgatcctccgttgattttggcctctttctccatgggcgggctgggcgtatttgaagcggttctctcttctgccgtta

SEQ ID NO: 142 - DNA, 1676 bp, Artificial Sequence
  Synthetic Construct- Sequence No. 142, Example 142: designer Nial-promoter-controlled chloroplast-targeted NADPH-dependent Alcohol Dehydrogenase DNA construct (1676 bp)
agaaaatctggcaccacaccatggtagggtgcgagtgaccccgcgcgacttggaagggttcaaacgaccccgccgtacgaacttttgtcggggggcgctcccggatggtagggtgcgagtgaccccgcgcgacttggaagggttcaaacgaccccgccgtacgaacttttgtcggggggcgctcccggatggccgccgtcattgccaagtcctccgtctccgcggccgtggctcgcccggcccgctccagcgtgcgccccatggccgcgctgaagcccgccgtcaaggctgcccccgtggctgccccggctcaggccaaccagatgcctatatactttttcaaataatttctttaaatcttttaaatttacttctctgacatttccactagtacaaatatcttcaagagcagatttagacataatatttatttcattaaaatatttttcttcatctattgctaaatcttttacacaactaggaagtcctaagtttttatttaaaacttccactgccacagctaaactttctgctccttcttctgtattatttgcaggaaaacctaaatcttttgaaatttcataatatctttgagcagtagttttattttctgaattgaatctaattatgtagggtaatatagttccatttatttttccatgagctatatgaaactttccaccaatagcgtgggctatactatgatttattcctaaaccagatttttcaaaagcaaaacctgctatacaagatgcctttgccatttcaatcctagcttcctcatcttttatatctctatacattctcaaaagatttttaaaaataagtcttatagctgaaagagcatatatttgagtataaaaatttgcttctttgcaagtgtatgactcaatagcatgagttagagcatctatacctgaatcagctacaactgattttggtagtgtttttgtaagttcaggatctagtattgcatattcaggtatcatctcattatcttttaatggaatttttacattattctttttatctgtaagaactgcataggaacttacttctgaacctgttccacttgtagttggtaaggctattaaagggatagataatccagatttttttacaaaatatttaattgacttagcagtatcaagagaagaacctcctcctattgctaccatcacatctggaagaaaatcaataaccttatctaaggctttactaactatttcaaatgctggatcaacttcaacttcattaaaaatcctataatctatatttttttgcttaaatatattttcaaattttttagtcattcctatttttgacataactgaatcagttactataaaggcttttttagctttaattttattaataacttcatcaaatttgtctcctacataaacatttgtatttacttcaaaaattttcattaaatggaggcgctcgttgatctgagccttgccccctgacgaacggcggtggatggaagatactgctctcaagtgctgaagcggtagcttagctccccgtttcgtgctgatcagtctttttcaacacgtaaaaagcggaggagttttgcaattttgttggttgtaacgatcctccgttgattttggcctctttctccatgggcgggctgggcgtatttgaagcggttctctcttctgccgtta

SEQ ID NO: 143 - DNA, 3629 bp, Artificial Sequence
  Synthetic Coonstruct- Sequence No. 143, Example 143: designer Nial-promoter-controlled chloroplast-targeted Phosphoenolpyruvate Carboxylase DNA construct (3629 bp)
agaaaatctggcaccacaccatggtagggtgcgagtgaccccgcgcgacttggaagggttcaaacgaccccgccgtacgaacttttgtcggggggcgctcccggatggtagggtgcgagtgaccccgcgcgacttggaagggttcaaacgaccccgccgtacgaacttttgtcggggggcgctcccggatggccgccgtcattgccaagtcctccgtctccgcggccgtggctcgcccggcccgctccagcgtgcgccccatggccgcgctgaagcccgccgtcaaggctgcccccgtggctgccccggctcaggccaaccagatgaccggtatttctcattcctgccgcaattccattaatggttaatagcgctcctctgagcaactcttccttagaataacggaaattaatgactccagactcagcttgtgcgttgtactgacgtaggcgtttgatgagagatacttgcaaaaatcctagaggaacaattgttccattgcgtaactgaacagaacgctgtaaggtgggatcgccatctaggagccgtttattctcggtaatttctaagactaagcggcaagtgcgatgatattcttgggctatttgctcaaacagccgctcaaagcgttctctatcttccggttgagacaattcctttacataatgataggcaatttgcaaatctaccttagataaggtcatttccacttttgagatgaccattttaaagaagggccatttgagataaaaatagcgcaacagtttcaaatgttcttcaggttcggtgctaataaactgttctaaagcggttcctaccccataccaagcgggtaacagaaaacgggtttgagtccaactaaagacccaaggaattgcgcgtagggtactgaggtcttttttcccacttttacgtctagccgggcgagaactaatttggagttgactaatttcttgaatgggggtgacagacatgaagaaatccacaaaatccggttcttcataaatcaaggcacgataggctttacgagaacaactggcgagttcttccatgatctcattccaaacctgaatatcatcaaagccgcagcctaacaaactcgattgaataacggcagtaacaatggtttctaggttataaagggctaattcagggagagaatatttagaagcgaggacttctccctgttcagtaattttaattctgccattaaccgtcgctgtcggttgagcgagaatagcggcataagcgggtccaccgcctcgtcctactgaacccccgcgtccgtgaaacaggcgtaaatctaagccatatcttttagcgactttttgtaaagctttttgggctttatgaatctcccaattactgcttaaaaacccagaatctttgttactgtcggaataaccgaccataatttcttgtaggttagtgggttctaagagggggggtttaagttcgcccacattttccccctgtaaagaggctaaatgatcatatcctcctgccaaagtggcgcggtaaagagtcaattcaaatagcgcccgcatgatttcgggtgcccgtttaaggtcttctacggtttcaaataggggtacaatgcggatcgtgctggaacaagtggccgggtcatagagtccggcttcttgtgccaagagaagaacctctaagacatcgctgacctcattagtcatactgataatgtaggtatgacagatctctaaaccaaattcttgttgtagctgccgcaacatcctcaaggtttctatcacttcgcaggttttctcagaaaacggcatttcctggggaatgagaggacgacgagtttttaattcttcgattaaccaggcggttctttcggcttcagtcagttggttgtagggtttaggcagaatttgtaaatattctgctatttcgttgatcgcatctgagtggttactcgactcttggcggaaatctagttgcgtgaggttaaacccataaacttctacctgacaaattaagctatctaattcttgacaacttaagccagtgctttctaggttacgccgcattaatttgagttcttctataaactcttctttattttggtaattgttggcgttggttgtcttgaacactaaaaggcgttcttctgggttagctaggcggctattgcggtcgcgggtattttccaggcgttttttaatataagctaacttaagacgatagggttcttgacggtaacgaatggctaactgattataaacttgtgggatttgtacgcggtctttttctagggagtctaacaaatccggcaggacgttacaccaatggagggaaggactaaggatattcgataactcatctaccctttcgatatatttttcgataacgacattgcgttgataacaggccgtggcccaagtcacttctggtgtaacaaaggggttcccatctcgatcgcctcccacccaagagccaaaataacagaaattattcttcggtgggcgtagtctggggaaggcactttttagagttcgtttgagacgaagggctaattgaggaattgcctcaaagaggacttcattaaaatagtgtagggagtagtccacttcatctaacacggtgggtttaaactggtgtaactcatcggtacgccaccagaggcgaatttcttctttaagctgttctttagcttcttctgcttcccaggagttggttagccccattcctctaaaggtttcttctgcctggtctaacttttgtaaaatatgagcgatacgccgttgtttgcgtcgaatggtgtggcgaacaatttcggtgggatgggctgtaaaaaccaggcgcacatctagttgttcgagtaggcgttgaatttgttgaggtggaacatttaattgttttaaatagggaaatagccagtgaaaagttcctattttttgatcattttgtttttcatcgttcaaacttctttctaaccaatttgctccaaatgccgaggagaatatactggtttgctcgccgttaatgccatttttggcactggactctccttcattgtaggtggcccgtcgtgagagttgttggtctcgttgttcgtagtgttgttcaacaatattaatgagttggaaatagagagcaaaagcgcgagacgttcttactgcttcattgaggtcgagtttttcaatcaattgggtaatggagtcttctaacgctttttgggcttgtccttgttcagaacaaattgcacgcagttttatgagcagatccaccaaatcttgcccgcattctgcctttagcacggcttcccataaatcttcgactaattttagtctagcttgtaaaaataagtctgatgtggagaagaattgtaatggggttgtggggacttgaactagcgaactcattaaatggaggcgctcgttgatctgagccttgccccctgacgaacggcggtggatggaagatactgctctcaagtgctgaagcggtagcttagctccccgtttcgtgctgatcagtctttttcaacacgtaaaaagcggaggagttttgcaattttgttggttgtaacgatcctccgttgattttggcctctttctccatgggcgggctgggcgtatttgaagcggttctctcttctgccgtta

SEQ ID NO: 144 - DNA, 1745 bp, Artificial Sequence
  Synthetic Construct- Sequence No. 144, Example 144: designer Nial-promoter-controlled chloroplast-targeted Aspartate Aminotransferase DNA construct (1745 bp)
agaaaatctggcaccacaccatggtagggtgcgagtgaccccgcgcgacttggaagggttcaaacgaccccgccgtacgaacttttgtcggggggcgctcccggatggtagggtgcgagtgaccccgcgcgacttggaagggttcaaacgaccccgccgtacgaacttttgtcggggggcgctcccggatggccgccgtcattgccaagtcctccgtctccgcggccgtggctcgcccggcccgctccagcgtgcgccccatggccgcgctgaagcccgccgtcaaggctgcccccgtggctgccccggctcaggccaaccagatgaaccgagacaccaagcaggctgttttggaagagctgtaaccgttccagacccttttcaatcgtttggcagtcagtggcgtaggagagccggatgctgcgatcgtcgccaaaggcaatgccgggaatggctgcaacttgatgttgatccaacagttgacggcaataggtcatcgagtcgagacctgttttgctgatgtccacgaagacgtagaacgccccttccggtattggacaggagagccccgcgatttgattcagtccgttcaagatcaactgacgccgctccgtaaaggcagccagcatttctgccacacaatcctgtggaccttgcagagctgcgatcgcgccgtactgggcaaaggtgcagacgtttgaggtgctgtggctttgcagcgatgcagcagcagcaattagctcgctcggacccgcgaggtagccaacccgccatcctgtcatcgagtaggctttggcgaagccgttgctgatcagcgttcgttcaaaacaggcggggctcaagctgccaatgctgtggtgatcggctccgtcgtaaaggatcttttcgtaaatttcatcagaaacgacccaaaagtcatgggcttcaatgatcggcgcgatcgcttccagttcttgccggctatagaccatccccgtgggattggagggggaattcagcactagcagccgtgtccgaggcgtaatcgcccctgccaattgctgcggctggagtttaaagccgtcgctggcgaaagtttcaacgatgacgggcacaccgcccgccaacttgaccatttcgggatagctcaaccagtaaggtgcggggataatcacctcatcgcccggatcgagcagcacctgcatcaggttgtagagtgactgcttaccgccattggtgacgagaatgttggcggcttggtaatcgagtccgttgtcggcgcgcaatttttgggcgatcgcttcgcgcagatcaggttcaccggctgcaggaccgtagcgagttttgccctctgctagcgcttgagctgctgcattgcgaatgtgcaaaggtgtttcaaagtcgggctccccggcgctgaagctgcagacatccaagccctcagctttcatcgctttggcttgggcagcgatcgcgagagtcaacgatggtgacactcgccccacacgctcggatagtttcattaaatggaggcgctcgttgatctgagccttgccccctgacgaacggcggtggatggaagatactgctctcaagtgctgaagcggtagcttagctccccgtttcgtgctgatcagtctttttcaacacgtaaaaagcggaggagttttgcaattttgttggttgtaacgatcctccgttgattttggcctctttctccatgggcgggctgggcgtatttgaagcggttctctcttctgccgtta

SEQ ID NO: 145 - DNA, 2366 bp, Artificial Sequence
  Synthetic Construct- Sequence No. 145, Example 145: designer Nial-promoter-controlled chloroplast-targeted Aspartokinase DNA construct (2366 bp)
agaaaatctggcaccacaccatggtagggtgcgagtgaccccgcgcgacttggaagggttcaaacgaccccgccgtacgaacttttgtcggggggcgctcccggatggtagggtgcgagtgaccccgcgcgacttggaagggttcaaacgaccccgccgtacgaacttttgtcggggggcgctcccggatggccgccgtcattgccaagtcctccgtctccgcggccgtggctcgcccggcccgctccagcgtgcgccccatggccgcgctgaagcccgccgtcaaggctgcccccgtggctgccccggctcaggccaaccagatggcgttaattgtccaaaaatacggtggaacctctgtcggttcagtagaacgcattcaaacagttgcccaacggattcaaaaaacagcccaaaatggcaatcaagtcgtggttgttgtttcggccatgggaaaaaccaccgatactttagtcaatttagccaaagagattaccccaaatccctgtcgtcgggaaatggatatgttattgtccacgggagaacaagtatcgatcgccttgatgagtatggccttacagaaattaggacaagcggccatctccttaactggggcacaagtggggatcgtcaccgaagcagaacacagtcgagcccgcatcctttccattaaaccccatcgcattcaacgccatctcgatcgcggtgaagttgtcgtggtcgccgggtttcaaggcattactaacgcagatgacttagaaattaccaccctagggcgagggggctcagatacctccgccgtcgccattgcggcagccttaaaagccagttgctgcgaaatctatacagatgtccccggcattctcaccaccgatccccgcatcgtccccgatgcccaattaatgggggaaattacctgcgatgagatgctagagttggccagtttaggggctaaggttcttcatccgagggcggtggaaattgcgcgtaattatggcattcctttagtggtgcgatcgagttggagtgatgcccccggaacccgcgtgacttctcccattcctaaaccgcgatcgctagaaggcttagaactgacaaaagccgttgatggggtgcaatttgaccccgatcaagccaaaatcgccttgttacgagtccccgatcgccccggagtcgctgcccgcctatttggggaaattgcccaccagcaggtggatgtagacttaattattcaatcgatccacgaagggaatagtaacgatatcgcctttacggtggttaaaaatgtactcactaaggccgaagccgtcgctgaagcgatcgccccggctttacggagtcattcagcgaatagcgatgaagcagaggtattagtcgagacgggagtggcgaaaattgccatttcaggggcaggaatgatcggacggccaggtattgccgcgaaaatgttcaaaattctcgcccaagaggggattaatatcgaaatgatctccacctcggaagtgaaggtcagttgtgtgattcgtcaagaagagggcgatcgcgccattaaagccctatgccaagggtttgaggtggaattgtccccgacggggattcctgagtcagtagtagcggtgttacctccagttcgaggagtcgctttagatgaaaaacaagcacaaatcgccctaattcatgttcaagatcggccggggatggctgctagtatctttggagtcttagcggatcataacatcagtattgatacgattattcaatcccaacgctgtcgaattgttgagggaatacccacccgtgatatcgcctttaccgttgcccaaattgatgtagaagctgctcaaaatgcgttaaaaaccctagccagtgcgtttagtgaaatgatcgtcgatagcgatgttgctaaagtcagtattgtaggggcgggaatggcgggacaacccggggtagcggccaagttttttgatgctttagctagacatcaaattaatattaaaatgattgcaacttcagaaataaaaattagttgtgttgttagcaaagatcaaggaattaaagctttaaaagcagttcatgaagcctttcaattagccggagaagaacgggtagaagttccagcttaataaatggaggcgctcgttgatctgagccttgccccctgacgaacggcggtggatggaagatactgctctcaagtgctgaagcggtagcttagctccccgtttcgtgctgatcagtctttttcaacacgtaaaaagcggaggagttttgcaattttgttggttgtaacgatcctccgttgattttggcctctttctccatgggcgggctgggcgtatttgaagcggttctctcttctgccgtta

SEQ ID NO: 146 - DNA, 1604 bp, Artificial Sequence
  Synthetic Construct- Sequence No. 146, Example 146: designer Nial-promoter-controlled chloroplast-targeted Aspartate-Semialdehyde Dehydrogenase DNA construct (1604 bp)
agaaaatctggcaccacaccatggtagggtgcgagtgaccccgcgcgacttggaagggttcaaacgaccccgccgtacgaacttttgtcggggggcgctcccggatggtagggtgcgagtgaccccgcgcgacttggaagggttcaaacgaccccgccgtacgaacttttgtcggggggcgctcccggatggccgccgtcattgccaagtcctccgtctccgcggccgtggctcgcccggcccgctccagcgtgcgccccatggccgcgctgaagcccgccgtcaaggctgcccccgtggctgccccggctcaggccaaccagatgtcagattcatacagagtagcaatattaggagcaactggtgcagtaggtacggaattactagaattactggaaactcggaactttccagtaggagaattaaaactcttagcttcagaattttcagcgggtaagaccttaaaatttaaggaacaaagtttacaagtagaagctgtaacaaatgattcatttaataaagtagatttagtgctagcatcagcaggtgcatctgtatcaaaagtatgggcaaagaaagcagtagaggctggagctgtagttattgacaattctagtgcttttcgtatggactcccaagtacctcttgtagtcccagaagttaacccagaagcagcggctttacataaaggtatagttgctaaccctaactgcacaacaatattaatgagtgtagcagtgtggccattgcacaaaatccagccagtccaaaggttagtagtggccacttatcaatcagcaagtggggccgggtcaagggctatggcagaaatgaaaattcaggcccaagaaatcttagatggaaaaactccaacaacagatatttttccctacccattagcatttaatttgttccctcataattctcaactcaatgagcagggatattgtcaagaagaaatgaaaatgcttgatgaaaccagaaaaatatttggctctaaggaactgagaattacagcaacttgtattcgagtaccagtattaagagctcattcagaagcaattaatttggaatttgctgaaccatttagtgtagttaaagcacgggaagtattaagtcaagcaccaggagtgacactggtagaaaattggcaagaaaattattttcctatgcctatggttgcaagtggtaaagatgatgtattggtggggagaattcgtcaggatatttctcaagctgaggggttagaattatggttaagtggagaccaggtaagaaaaggagctgccttgaatgcagtacaaatagctgaattattggtggcaaaaaattggctgagaataccagtaggaacattttaataaatggaggcgctcgttgatctgagccttgccccctgacgaacggcggtggatggaagatactgctctcaagtgctgaagcggtagcttagctccccgtttcgtgctgatcagtctttttcaacacgtaaaaagcggaggagttttgcaattttgttggttgtaacgatcctccgttgattttggcctctttctccatgggcgggctgggcgtatttgaagcggttctctcttctgccgtta

SEQ ID NO: 147 - DNA, 1868 bp, Artificial Sequence
  Synthetic Construct- Sequence No. 147, Example 147: designer Nial-promoter-controlled chloroplast-targeted Homoserine Dehydrogenase DNA construct (1868 bp)
agaaaatctggcaccacaccatggtagggtgcgagtgaccccgcgcgacttggaagggttcaaacgaccccgccgtacgaacttttgtcggggggcgctcccggatggtagggtgcgagtgaccccgcgcgacttggaagggttcaaacgaccccgccgtacgaacttttgtcggggggcgctcccggatggccgccgtcattgccaagtcctccgtctccgcggccgtggctcgcccggcccgctccagcgtgcgccccatggccgcgctgaagcccgccgtcaaggctgcccccgtggctgccccggctcaggccaaccagatgaagcactcgcaggacgctaggaatgctattaatcgcttgagattgctcaatttcagctaaggcttgccgaaaattgccttctcgtacatcatgagtgaccacgacgatttctgctaactgtccctgaaatccaatttgaacgacggattctagactaacatggtgctgaccaaaacaagttcctaaatgcccaatcaccccagggacatcttcacagagaaagcgggcataaaagcgagtttttaaatcttcaattggggtcagactacaataatgttgatgggtgacgttcaataaaggatctaaagattgtgcttgtcctccactgctttgcagaatgccgacgatattcataatatctgaaacgactgcactggcggttggacctgcccccgcaccgggtccaaaaaacatcacttgtcctaacggttctcccttgaccaaaatggcgttataaaccccattaatactggctagtggatgatctttggctattaaagtgggatgtactcgcacttgtaaggtttctgaatcatctcctttagaaccttgggcaatggctaataatttaatcacaaatccgagtttatcagcataagtaatatcggcggcactgacttgacgaatgccctcacaataaatctcttcgcgttttacccgtccggcaaaaccgatggaggccaaaatagcaattttatcggctgcatctaatccgtctacatctgccgtcggatcggcttcagcatagcctaatttttgggcttctgctaatacctcgccaaaatcggctccctcagaggtcatttggctgaggatataattggtcgttccgttaataatgccaataatattactaatccgattggcccctaatgattgtttgaggggtttaatcactggaattcccccccccacagccgcttctaataacacataaacgccggctgcattggccgcttcataaatttcatccccataacgagcgatcactgccttattggccgtgacaatgtgctttttatgggcaatggccttcatgatgagtgacttggctggttctagtcctccgagcagttctacgacaatatcaatctctggatcaatgacaatactttctagatctgttgtaatcacggcgggagggagttgaacttgacggggtttgtcaagagagcgcactcctgcccgtttaatctcgatatcttttaagataggattacgtccccagggatcgagtagaatttgtgctgtccccgttcccacagttcccaagcctaataaacctattttaaatgccactaaatggaggcgctcgttgatctgagccttgccccctgacgaacggcggtggatggaagatactgctctcaagtgctgaagcggtagcttagctccccgtttcgtgctgatcagtctttttcaacacgtaaaaagcggaggagttttgcaattttgttggttgtaacgatcctccgttgattttggcctctttctccatgggcgggctgggcgtatttgaagcggttctctcttctgccgtta

SEQ ID NO: 148 - DNA, 1472 bp, Artificial Sequence
  Synthetic Construct- Sequence No. 148, Example 148: designer Nial-promoter-controlled chloroplast-targeted Homoserine Kinase DNA construct (1472 bp)
agaaaatctggcaccacaccatggtagggtgcgagtgaccccgcgcgacttggaagggttcaaacgaccccgccgtacgaacttttgtcggggggcgctcccggatggtagggtgcgagtgaccccgcgcgacttggaagggttcaaacgaccccgccgtacgaacttttgtcggggggcgctcccggatggccgccgtcattgccaagtcctccgtctccgcggccgtggctcgcccggcccgctccagcgtgcgccccatggccgcgctgaagcccgccgtcaaggctgcccccgtggctgccccggctcaggccaaccagatgattaacaattttggccccttccatatctaaagagagtgcttgcacttgcgccgctaccccttcattttcccacgccaccctcatcgcttcagtcaccctatccgcttcaccctgagaacttaaagcgagtaaagtgggacctgccccactgattaccataccataagccccggctgcgatagccgctcgtttcaccgcttcgtaacctttaattaaaccttgacgatagggttgatgcagcttatcctccatcgccatagctaaccagtctcctcgcccctgttcgagtccttgtaacaataaccctaaacgtgcaatattaaaaatagcatcagcgcggctatactgagtgggtaaaacgcctctcgcttcttgagtagataattcaaaatccggaatagccacaatgggaatcagtttgtcataccagggaatctcgcaaatttgccaattccccatttcccccacacataagcgactgcttcccaataaagcgggaaccacattatcgggatgtccttctaaagatatggctaattccatcacttcagattgagttaaagggttaccggctagataatttgcccccactaaaccccctacaatggctgtggctgaacttcctaaccctctggctaaaggaacccctaatttgatctcaatttctacagcaggaaccggttgattgagatgttgatagaaaagcgcaaaagattgataaagtaaattagttttatctcgactaacccgttctgcttctgcgccgcttacgagaattttctcttcggtttctgaagtgagagtaaacttaaattgattataaagggttaaagcggctcctagacaatcaaagcctggaccaagattagcggtagtagcaggaacggttagggtaacggtcattaaatggaggcgctcgttgatctgagccttgccccctgacgaacggcggtggatggaagatactgctctcaagtgctgaagcggtagcttagctccccgtttcgtgctgatcagtctttttcaacacgtaaaaagcggaggagttttgcaattttgttggttgtaacgatcctccgttgattttggcctctttctccatgggcgggctgggcgtatttgaagcggttctctcttctgccgtta

SEQ ID NO: 149 - DNA, 1655 bp, Artificial Sequence
  Synthetic Construct- Sequence No. 149, Example 149: designer Nial-promoter-controlled chloroplast-targeted Threonine Synthase DNA construct (1655 bp)
agaaaatctggcaccacaccatggtagggtgcgagtgaccccgcgcgacttggaagggttcaaacgaccccgccgtacgaacttttgtcggggggcgctcccggatggtagggtgcgagtgaccccgcgcgacttggaagggttcaaacgaccccgccgtacgaacttttgtcggggggcgctcccggatggccgccgtcattgccaagtcctccgtctccgcggccgtggctcgcccggcccgctccagcgtgcgccccatggccgcgctgaagcccgccgtcaaggctgcccccgtggctgccccggctcaggccaaccaggtgaccctaacttggcctatttctaaatctgcgtcctggtcaggtctgatcaacgcctaccgttcctatttacctgtcacggaagccactccgattgtcaccctgcatgaagggaacacgcccctgattccggtgcccagcattgccgctgaaattggccggcaagttcaggtctatgtcaagtacgacggtttgaaccccacgggcagctttaaagatcggggtatgaccatggcgatctccaaggctaaggaagccggagccaaggcggtgatctgtgccagtaccggcaatacctctgcggcggcagcggcctatggacggcggggcggcatgcgggtctttgtcctcatccccgatggttatgtcgctctgggaaaattagcccaagccctggtctatggcgcagaggtgctggccattcagggcaactttgatcaggcattgaccctggtgcagcaattagccgaaacccagcccgtcaccctggtgaattccgtcaacccctaccggctggaaggtcagaaaactgctgcctttgaagtggtggatgccctgggtaatgcccccgactggctctgtattcccgtgggcaatggcggcaatatcaccgcttactggatgggattctgtcagtatcgggaacaggatcgttgcgatcgtctaccccggatgatgggttttcaagcagccggctctgctccccttgtccatggccaggtggtgacccatcctgaaactgtagcgaccgccattcggattggtaacccggccaactggcagcgggcgatggccgtgcgggatgccagccagggagaattcaatgctgtcagcgatgccgaaattctcgctgcctaccgtctgctggccagtcaggaagggatcttttgtgaacccgccagtgccgcgtccgtcgccggtctattaaaggtgaaagatcaggttccgacgggggcaacggtggtctgtgtcctgacggggaatggattgaaagatcctgatagcgcaattaagcagcaaagtaaccagttccatcagggcatcccagctcagctcgaagccgtggcagccgtgatgggcttccgttagtaaatggaggcgctcgttgatctgagccttgccccctgacgaacggcggtggatggaagatactgctctcaagtgctgaagcggtagcttagctccccgtttcgtgctgatcagtctttttcaacacgtaaaaagcggaggagttttgcaattttgttggttgtaacgatcctccgttgattttggcctctttctccatgggcgggctgggcgtatttgaagcggttctctcttctgccgtta

SEQ ID NO: 150 - DNA, 2078 bp, Artificial Sequence
  Synthetic Construct- Sequence No. 150, Example 150: designer Nial-promoter-controlled chloroplast-targeted Threonine Ammonia-Lyase DNA construct (2078 bp)
agaaaatctggcaccacaccatggtagggtgcgagtgaccccgcgcgacttggaagggttcaaacgaccccgccgtacgaacttttgtcggggggcgctcccggatggtagggtgcgagtgaccccgcgcgacttggaagggttcaaacgaccccgccgtacgaacttttgtcggggggcgctcccggatggccgccgtcattgccaagtcctccgtctccgcggccgtggctcgcccggcccgctccagcgtgcgccccatggccgcgctgaagcccgccgtcaaggctgcccccgtggctgccccggctcaggccaaccagatgtaagaagagtcgataggctggattgtcactttcgttccagtaccgatagcccagggttttgagaaatgattcccactgagccatctcttgtggagggacttgcatcccgacgacgattctgccgtagtctgcgccgtgattgcggtagtggaataggctgatgttccaatctgggctcattttcgtgacaaagttagctaatgcgcccggtcgctcaggaaattcaaaccgatagagcagttcgttttgagctagcggtgacttgccgcctaccatgtgccgcaaatgcatcttggctagctcatcatcagttagatctagcgtcttaaatccattgtctctaaacttgtgggcgatcgcctgcgcatcggctctattttctatctgaatgcccacaaaaatatgagcttgatcggcatctgcaatccgatagttgaattcgctaaggctgtggctaccgaggatatcgcaaaatttgctgagactgcctgcccgctctggaatcgtaacggcaaagacggcttctcttccttctcctagctcggctcgctcggctacaaagcgcagacgatcaaagttcatattggccccacaagcgatcgccaccaacgtttctccctgaatttcttctcgctctacataggctttgatacctgcgatcgcgagcgccccagcgggttccaaaattgagcgagtatcttcaaatacgtccttgatcgcggcgcaggtatcatctgtagttaccagcaacacatcatcgacatactgttggcacagacgaaacgtttcctccccgacctggcgcaccgctacgccatctgcaaacaggcctacttgatccaacttgacacgattcccttttgctaatgattgacgcatggcatcagcatccaccggctccacaccaatgatcttaacttcaggacgtaagcgtttgatataagcggcaatgcccgaaattaaaccaccccccccaatcgcaacaaaaatggcatgaatcggcttctgatgctgtcgcaagatctccatgccgatcgttccctgcccggcaatgacgtctggatcgtcaaacggatgcacaaaggtaagtcctttttccacttctagctggcgtgcgtgtgcataggcatcgtcgtaggtgtcaccgtgtaagacaacgagtccgcctctggccttcaccgcatcaatcttgacttgcggcgtcgtgatcggcataacaattaccgctgacgtacccaattctctagcgcctagcgccaccccctgtgcgtggttgcccgcagaagctgcaatcaccccacgctgcaacagttctgaaggtagctgcgccattttgttataggcaccgcgtagtttgaaggagaaaacagactgtacatcttcccgttttagcagcacctgattacctagccgctccgatagcctcggcgcgatatctaaaggcgtttcttgcgccacgtcataaacgcgggccttcaaaatgcgttctaaatagtcagaataaaccactaaatggaggcgctcgttgatctgagccttgccccctgacgaacggcggtggatggaagatactgctctcaagtgctgaagcggtagcttagctccccgtttcgtgctgatcagtctttttcaacacgtaaaaagcggaggagttttgcaattttgttggttgtaacgatcctccgttgattttggcctctttctccatgggcgggctgggcgtatttgaagcggttctctcttctgccgtta

SEQ ID NO: 151 - DNA, 2282 bp, Artificial Sequence
  Synthetic Construct- Sequence No. 151, Example 151: designer Nial-promoter-controlled chloroplast-targeted Acetolactate Synthase DNA construct (2282 bp)
agaaaatctggcaccacaccatggtagggtgcgagtgaccccgcgcgacttggaagggttcaaacgaccccgccgtacgaacttttgtcggggggcgctcccggatggtagggtgcgagtgaccccgcgcgacttggaagggttcaaacgaccccgccgtacgaacttttgtcggggggcgctcccggatggccgccgtcattgccaagtcctccgtctccgcggccgtggctcgcccggcccgctccagcgtgcgccccatggccgcgctgaagcccgccgtcaaggctgcccccgtggctgccccggctcaggccaaccagatgttgacaaaagcaacaaaagaacaaaaatcccttgtgaaaaacagaggggcggagcttgttgttgattgcttagtggagcaaggtgtcacacatgtatttggcattccaggtgcaaaaattgatgcggtatttgacgctttacaagataaaggacctgaaattatcgttgcccggcacgaacaaaacgcagcattcatggcccaagcagtcggccgtttaactggaaaaccgggagtcgtgttagtcacatcaggaccgggtgcctctaacttggcaacaggcctgctgacagcgaacactgaaggagaccctgtcgttgcgcttgctggaaacgtgatccgtgcagatcgtttaaaacggacacatcaatctttggataatgcggcgctattccagccgattacaaaatacagtgtagaagttcaagatgtaaaaaatataccggaagctgttacaaatgcatttaggatagcgtcagcagggcaggctggggccgcttttgtgagctttccgcaagatgttgtgaatgaagtcacaaatacgaaaaacgtgcgtgctgttgcagcgccaaaactcggtcctgcagcagatgatgcaatcagtgcggccatagcaaaaatccaaacagcaaaacttcctgtcgttttggtcggcatgaaaggcggaagaccggaagcaattaaagcggttcgcaagcttttgaaaaaggttcagcttccatttgttgaaacatatcaagctgccggtaccctttctagagatttagaggatcaatattttggccgtatcggtttgttccgcaaccagcctggcgatttactgctagagcaggcagatgttgttctgacgatcggctatgacccgattgaatatgatccgaaattctggaatatcaatggagaccggacaattatccatttagacgagattatcgctgacattgatcatgcttaccagcctgatcttgaattgatcggtgacattccgtccacgatcaatcatatcgaacacgatgctgtgaaagtggaatttgcagagcgtgagcagaaaatcctttctgatttaaaacaatatatgcatgaaggtgagcaggtgcctgcagattggaaatcagacagagcgcaccctcttgaaatcgttaaagagttgcgtaatgcagtcgatgatcatgttacagtaacttgcgatatcggttcgcacgccatttggatgtcacgttatttccgcagctacgagccgttaacattaatgatcagtaacggtatgcaaacactcggcgttgcgcttccttgggcaatcggcgcttcattggtgaaaccgggagaaaaagtggtttctgtctctggtgacggcggtttcttattctcagcaatggaattagagacagcagttcgactaaaagcaccaattgtacacattgtatggaacgacagcacatatgacatggttgcattccagcaattgaaaaaatataaccgtacatctgcggtcgatttcggaaatatcgatatcgtgaaatatgcggaaagcttcggagcaactggcttgcgcgtagaatcaccagaccagctggcagatgttctgcgtcaaggcatgaacgctgaaggtcctgtcatcatcgatgtcccggttgactacagtgataacattaatttagcaagtgacaagcttccgaaagaattcggggaactcatgaaaacgaaagctctctagtaaatggaggcgctcgttgatctgagccttgccccctgacgaacggcggtggatggaagatactgctctcaagtgctgaagcggtagcttagctccccgtttcgtgctgatcagtctttttcaacacgtaaaaagcggaggagttttgcaattttgttggttgtaacgatcctccgttgattttggcctctttctccatgggcgggctgggcgtatttgaagcggttctctcttctgccgtta

SEQ ID NO: 152 - DNA, 1562 bp, Artificial Sequence
  Synthetic Construct- Sequence No. 152, Example 152: designer Nial-promoter-controlled chloroplast-targeted Ketol-Acid Reductoisomerase DNA construct (1562 bp)
agaaaatctggcaccacaccatggtagggtgcgagtgaccccgcgcgacttggaagggttcaaacgaccccgccgtacgaacttttgtcggggggcgctcccggatggtagggtgcgagtgaccccgcgcgacttggaagggttcaaacgaccccgccgtacgaacttttgtcggggggcgctcccggatggccgccgtcattgccaagtcctccgtctccgcggccgtggctcgcccggcccgctccagcgtgcgccccatggccgcgctgaagcccgccgtcaaggctgcccccgtggctgccccggctcaggccaaccagatgagccttttttagccaactaaacatagctcgtaaatctttaccgacttcttcaataggatgttcagcttcttgacgacgcatggcgataaatccgggttttcctgactggttttctaagacaaattcccgagcaaattgaccggattgaatttctttaaggattttccgcatttcttgccgggtttgatccgtaacaatacgaggacctctagtatagtctccatattctgccgtattggaaatgctatcgcgcatcttagctaatccgccttctaccaccagatcaacgattagtttaacttcgtggagacattcaaaataagccaattcaggctgatatccggcttcgactaaggtttcaaatccggctttaattaaagcacttagaccgccacagaggactacttgttcaccaaataaatcagtttctgtttcttctcggaaagtcgtttctaaaacaccggcacgagttcctccaatccctttagcataagccatagcgcgatcgcgggcttgtcctgaagcatcttgaaagactgcaaataaacaggggactccttcgccttgggtgtaggtacgtctgacgagatgtcctggaccttttggtgccaccataaccacatctaccgtagaaggaggaattacttgtccaaaatgaatattaaatccatgagcaaacaaaagaactttgccttcttttaaatggggttcaatttcatttttatagacgcttttttgtacctcatctggcagcaaaatcataatccagtcggcggcggcggcggcatcggctacacttttaaccgttaagccggcttcagtggctttttgggctgacttactcccaggatacagccccacaataacattaactccgctatctttaagattaagggcatgggcatggccttgagaaccatagccgataatggcaaccgttttattagcaagtaagtctaaattggcatcttcatcgtaatacattcgagccattaaatggaggcgctcgttgatctgagccttgccccctgacgaacggcggtggatggaagatactgctctcaagtgctgaagcggtagcttagctccccgtttcgtgctgatcagtctttttcaacacgtaaaaagcggaggagttttgcaattttgttggttgtaacgatcctccgttgattttggcctctttctccatgggcgggctgggcgtatttgaagcggttctctcttctgccgtta

SEQ ID NO: 153 - DNA, 2252 bp, Artificial Sequence
  Synthetic Construct- Sequence No. 153, Example 153: designer Nial-promoter-controlled chloroplast-targeted Dihydroxy-Acid Dehydratase DNA construct (2252 bp)
agaaaatctggcaccacaccatggtagggtgcgagtgaccccgcgcgacttggaagggttcaaacgaccccgccgtacgaacttttgtcggggggcgctcccggatggtagggtgcgagtgaccccgcgcgacttggaagggttcaaacgaccccgccgtacgaacttttgtcggggggcgctcccggatggccgccgtcattgccaagtcctccgtctccgcggccgtggctcgcccggcccgctccagcgtgcgccccatggccgcgctgaagcccgccgtcaaggctgcccccgtggctgccccggctcaggccaaccagatgtcagataattacagaagtcgcatcattacacaaggcagtcaacgtacaccaaaccgggccatgcttcgggcggtaggttttggagataatgactttactaagcccattgtgggagtggctaacggatacagcaccattaccccttgtaatatgggcatcaatgatctcgcgctgcgggccgaagccggactcaagcaagcgggagccatgccgcaaattttcggcaccattaccgtgagtgacggaatttctatgggaacagaaggaatgaaatactccctcgtctcgcgcgatgtgatcgctgactctatcgaaaccgcttgtaacggtcaaagtatggatggtgtgcttgccattggcggctgtgataaaaatatgcccggggccatgatcgccatcgctcgtatgaatatccctgctatcttcgtctatggcggtaccattaaacccggaaaatacaacggacaagatttaaccgttgtcagtgcctttgaagccgtaggacaacatagtgccggtaaaatagatgatgctcaattattaggaatagaacggaatgcttgccccggggcgggttcctgtgggggaatgtttaccgctaacaccatgtcctccgcttttgaagtaatggggatgagcttaccttattcttccactatggcagcagaagatgcagaaaaagccgacagtaccgaaaaatccgcttttgtgctggtagatgccatcagaaagcaaattttgcccagtcagattttaacccgtaaagcctttgagaatgcgatttccgtgattatggccgttgggggatcgaccaacgcggttttacatttattagcgatcgctcataccataggggtagaactgagcatcgatgactttgaagccattagagctagagttcccgtactttgtgacctcaaaccgagtggacgctatgtcatcgttgatttacatcaggcggggggcattccccaagtgatgaaaatgcttctcgtccatgacttattacacggggatgctttaaccatcaccggtcaaacggttgcagaagttttaaaagacgtacccgatgaaccccctcaaggacaagatgtcattcgtccttggaataacccagtgtataaagaaggacacctagcgatcttaaaaggaaatttagccaccgagggagcagtcgctaaaattagcggggtcaaaaatcctaaaattaccggtccggcgcgagtatttgaatccgaggaaagctgtctagaggcgattcttgcaggtaaaattcaagctggcgatgtgattattgttcgttatgaagggcccaaaggtggccccggtatgagagaaatgttagccccgacttcagccattattggggcaggattgggagattccgtaggattaattactgatgggcgtttttctgggggaacttacgggctagtcgtcggtcatgttgccccagaagcagcagtaggcggaaatattgccctcgtacaagagggagatagcattaccattgatgcgaaagagcgattattacagcttaatgtagctgaagatgaattaatccgtcgtcgcgctaactggcaaccgcccatccctcgttataccaaaggtgtattagcgaaatatgccaaattagtctcttctagtagtataggagcggttaccgacaaagatttattctaataaatggaggcgctcgttgatctgagccttgccccctgacgaacggcggtggatggaagatactgctctcaagtgctgaagcggtagcttagctccccgtttcgtgctgatcagtctttttcaacacgtaaaaagcggaggagttttgcaattttgttggttgtaacgatcctccgttgattttggcctctttctccatgggcgggctgggcgtatttgaagcggttctctcttctgccgtta

SEQ ID NO: 154 - DNA, 1496 bp, Artificial Sequence
  Synthetic Construct- Sequence No. 154, Example 154: designer Nial-promoter-controlled chloroplast-targeted 2-Methylbutyraldehyde Reductase DNA construct (1496 bp)
agaaaatctggcaccacaccatggtagggtgcgagtgaccccgcgcgacttggaagggttcaaacgaccccgccgtacgaacttttgtcggggggcgctcccggatggtagggtgcgagtgaccccgcgcgacttggaagggttcaaacgaccccgccgtacgaacttttgtcggggggcgctcccggatggccgccgtcattgccaagtcctccgtctccgcggccgtggctcgcccggcccgctccagcgtgcgccccatggccgcgctgaagcccgccgtcaaggctgcccccgtggctgccccggctcaggccaaccagatggcagttccatccaattctactaaaactttcaagctgaacaacggcctgtccattccagcagtcggtctcggaacatggcaatccaccgatgaagaggcttacaatgccgttattgctgcattgaaagctggatacagacacatcgacacagcttactgttacggaaatgaagagccaattggcaaagctattaaggactctggagttgcaagaaaggacatttttattactaccaaactttggggaactgaccacaccagaactgaggaaggtttggataggtctctgaaattgttgggtttggactatgttgatctgttcttgatgcattggccagttccaatgaaccctaatggaaaccacgacaaatttcctacattaccagacggtaaacgtgacattctgtttgactggaacttcgttgatacatacagagagatgcaaaaattagttgcctctggaaagaccaaggcaatcggtgtgtccaatttttctatcactaacttgaagaaattgcttgcagacccagaaatcaccatcaagccagttgtcaaccaagttgaaattcacgggtatctgccgcagcagagacttttggagtatgcgaaggaaaatgatattgttttggaggcatattcaccgttgggatccactggtgccccattgctgaaagatgagctggtgcaggacctagccaagaagaatggtatttctgaatctactctcttaatttcctgggcagtgtggagaggtatcgtcgttttaccaaaatctgtaacgccttccagaattgctgataatcttaagatcattgagttgtgtgaggaggatggaaaaaaacttaatgaattggcctcgattagaggagaaaaacgattagttagccctccttgggatcctattgtcgtcttcaacgatgaagactaataaatggaggcgctcgttgatctgagccttgccccctgacgaacggcggtggatggaagatactgctctcaagtgctgaagcggtagcttagctccccgtttcgtgctgatcagtctttttcaacacgtaaaaagcggaggagttttgcaattttgttggttgtaacgatcctccgttgattttggcctctttctccatgggcgggctgggcgtatttgaagcggttctctcttctgccgtta

SEQ ID NO: 155 - DNA, 1595 bp, Artificial Sequence
  Synthetic Construct- Sequence No. 155, Example 155: designer Nial-promoter-controlled chloroplast-targeted 3-Methylbutanal Reductase DNA construct (1595 bp)
agaaaatctggcaccacaccatggtagggtgcgagtgaccccgcgcgacttggaagggttcaaacgaccccgccgtacgaacttttgtcggggggcgctcccggatggtagggtgcgagtgaccccgcgcgacttggaagggttcaaacgaccccgccgtacgaacttttgtcggggggcgctcccggatggccgccgtcattgccaagtcctccgtctccgcggccgtggctcgcccggcccgctccagcgtgcgccccatggccgcgctgaagcccgccgtcaaggctgcccccgtggctgccccggctcaggccaaccagatgtcagttttcgtttcaggtgctaacgggttcattgcccaacacattgtcgatctcctgttgaaggaagactataaggtcatcggttctgccagaagtcaagaaaaggccgagaatttaacggaggcctttggtaacaacccaaaattctccatggaagttgtcccagacatatctaagctggacgcatttgaccatgttttccaaaagcacggcaaggatatcaagatagttctacatacggcctctccattctgctttgatatcactgacagtgaacgcgatttattaattcctgctgtgaacggtgttaagggaattctccactcaattaaaaaatacgccgctgattctgtagaacgtgtagttctcacctcttcttatgcagctgtgttcgatatggcaaaagaaaacgataagtctttaacatttaacgaagaatcctggaacccagctacctgggagagttgccaaagtgacccagttaacgcctactgtggttctaagaagtttgctgaaaaagcagcttgggaatttctagaggagaatagagactctgtaaaattcgaattaactgccgttaacccagtttacgtttttggtccgcaaatgtttgacaaagatgtgaaaaaacacttgaacacatcttgcgaactcgtcaacagcttgatgcatttatcaccagaggacaagataccggaactatttggtggatacattgatgttcgtgatgttgcaaaggctcatttagttgccttccaaaagagggaaacaattggtcaaagactaatcgtatcggaggccagatttactatgcaggatgttctcgatatccttaacgaagacttccctgttctaaaaggcaatattccagtggggaaaccaggttctggtgctacccataacacccttggtgctactcttgataataaaaagagtaagaaattgttaggtttcaagttcaggaacttgaaagagaccattgacgacactgcctcccaaattttaaaatttgagggcagaatataataaatggaggcgctcgttgatctgagccttgccccctgacgaacggcggtggatggaagatactgctctcaagtgctgaagcggtagcttagctccccgtttcgtgctgatcagtctttttcaacacgtaaaaagcggaggagttttgcaattttgttggttgtaacgatcctccgttgattttggcctctttctccatgggcgggctgggcgtatttgaagcggttctctcttctgccgtta

SEQ ID NO: 156 - DNA, 1739 bp, Artificial Sequence
  Synthetic Construct- Sequence No. 156, Example 156: designer Nial-promoter-controlled chloroplast-targeted NADH-dependent Butanol Dehydrogenase DNA construct (1739 bp)
agaaaatctggcaccacaccatggtagggtgcgagtgaccccgcgcgacttggaagggttcaaacgaccccgccgtacgaacttttgtcggggggcgctcccggatggtagggtgcgagtgaccccgcgcgacttggaagggttcaaacgaccccgccgtacgaacttttgtcggggggcgctcccggatggccgccgtcattgccaagtcctccgtctccgcggccgtggctcgcccggcccgctccagcgtgcgccccatggccgcgctgaagcccgccgtcaaggctgcccccgtggctgccccggctcaggccaaccagatgaataattttactttttataatcctactaaaattaactttggtagaggagttgaatcctctgttggagaagagattaaaagcttaggagctagtaaagtgctttttcattatggtggaggaagtattagaaaaaatgggttatatgatagaattttagattctttaaataaagcaggattacatgtaatagaacttggaggagttaagcctaatcctagattaagcttagttaaaaagggaatagaactttgtaaaaatagtaaagttgattttatacttgcagttggaggaggaagtgttattgactcagctaaagccatagctcttggtgttccttatgatggagatgtatgggatttctttactaaaaatattaaaatagaaaaagctttaccattaggtacagtattaacaataccagcggcaggaagtgaatcaagctcaggaactgttataactaatgaagatggatggtataagagatcaacaggatcaccacttctatatcctaaattttcaatgttaaatccagaactatgctttactttaccagaatatcaaatagcatcaggaagtgcagatattttagcacatttaatggaaagatatttcacaaacacaaagaatgttgaacttatagatagattaattgagggaacaatgaaaacagtaataaataatgttcctaaggtattaaaaaataaggaagactatgatagctttgcagaggttatgtgggctggaacaatagcacataataatcttttaagcacaggaagagaaacagattgggcatcacataatatagaacatgaattaagtggaatatatgatgttactcatggtgcaggattagctgttatattcccagcttggatgaagtttgtttataagcatgatttagatagattcaaccaatttgctactagagtatttgatgttcaagttgaagataaaactaaggaagaggttgccttagaaggaattaagaaacttgaagaattcttcaaatcaataaatcttccagtaactttaaaagagttagaaataggtgaagatagattagaagaaatggctaaaaaatgcacagataatgatgagcatacagtaggtcattttgtagaattaaacacagaggacatccttgaaatatacaaattagctttatagtaaatggaggcgctcgttgatctgagccttgccccctgacgaacggcggtggatggaagatactgctctcaagtgctgaagcggtagcttagctccccgtttcgtgctgatcagtctttttcaacacgtaaaaagcggaggagttttgcaattttgttggttgtaacgatcctccgttgattttggcctctttctccatgggcgggctgggcgtatttgaagcggttctctcttctgccgtta

SEQ ID NO: 157 - DNA, 1733 bp, Artificial Sequence
  Synthetic Construct- Sequence No. 157, Example 157: designer Nial-promoter-controlled NADPH-dependent chloroplast-targeted NADPH-dependent Butanol Dehydrogenase DNA construct (1733 bp)
agaaaatctggcaccacaccatggtagggtgcgagtgaccccgcgcgacttggaagggttcaaacgaccccgccgtacgaacttttgtcggggggcgctcccggatggtagggtgcgagtgaccccgcgcgacttggaagggttcaaacgaccccgccgtacgaacttttgtcggggggcgctcccggatggccgccgtcattgccaagtcctccgtctccgcggccgtggctcgcccggcccgctccagcgtgcgccccatggccgcgctgaagcccgccgtcaaggctgcccccgtggctgccccggctcaggccaaccagatgatgagatttacattaccaagagatatttattatggaaaaggatcactagaacaactaaaaaatcttaaaggtaaaaaggcaatgctagtacttggtggcggttcgatgaaaagatttggatttgtcgataaggtgttaggatacttaaaggaagctggaatagaagtaaaattaatagaaggagttgaaccagacccatcagttgaaacagtgttcaagggcgctgagttaatgagacaatttgaaccagattggattatagctatgggtggtggatcaccaattgatgctgcaaaagcaatgtggattttttatgaacacccagaaaaaacttttgatgacattaaagatccgtttacagtaccagaattaagaaataaggctaagttcctagcgattccatcaacaagtggtacagcaacagaagtaacagcattttctgtaattacagattataagactgaaataaaatatcctttagctgattttaatataactccagatgtagctgtagtagattcagaattagctgaaacaatgccacctaagttaactgcccatacaggaatggatgcattaactcatgcaattgaagcttatgtagcaacattacattcaccatttactgatccactagctatgcaagcgattgaaatgattaatgaacatttatttaaatcatatgaaggcgataaagaagctagagaacaaatgcattatgctcaatgtttagctggaatggctttctctaatgcactattaggaatatgtcatagtatggcgcataaaacaggggctgtattccatatccctcatggatgtgcgaatgcaatctatttaccatatgtaattaagtttaattcaaaaacttcattagaaagatatgctaaaatagcaaaacaaatttcattagcaggaaatacaaatgaggaattagttgattcattaataaacttagttaaagaattaaataagaagatgcaaataccaacaacattaaaagaatatggtattcatgaacaagaatttaagaataaggttgatttgatttcagaaagagctattggagatgcttgtactggatcaaatccaagacaattaaataaagatgaaatgaaaaagatttttgaatgcgtatattatggtacagaagttgatttttaataaatggaggcgctcgttgatctgagccttgccccctgacgaacggcggtggatggaagatactgctctcaagtgctgaagcggtagcttagctccccgtttcgtgctgatcagtctttttcaacacgtaaaaagcggaggagttttgcaattttgttggttgtaacgatcctccgttgattttggcctctttctccatgggcgggctgggcgtatttgaagcggttctctcttctgccgtta

SEQ ID NO: 158 - DNA, 1745 bp, Artificial Sequence
  Synthetic Construct- Sequence No. 158, Example 158: designer Nial-promoter-controlled chloroplast-targeted 3-Ketothiolase DNA construct (1745 bp)
agaaaatctggcaccacaccatggtagggtgcgagtgaccccgcgcgacttggaagggttcaaacgaccccgccgtacgaacttttgtcggggggcgctcccggatggtagggtgcgagtgaccccgcgcgacttggaagggttcaaacgaccccgccgtacgaacttttgtcggggggcgctcccggatggccgccgtcattgccaagtcctccgtctccgcggccgtggctcgcccggcccgctccagcgtgcgccccatggccgcgctgaagcccgccgtcaaggctgcccccgtggctgccccggctcaggccaaccagatgaccgacatcgtcatcgtcgccgcagcccgcaccgccgtgggcaagttcggcggctcgctggccaagatcccggcgcctgagctgggcgctgccgtgatcaaggccctgctggaaaaaaccggcgtgggcgccgaccagatcggtgaagtcatcatgggccaggtgctggccgccggcgcgggccagaacccggctcgccaggccatgatgaaggcgggcatcgccaaggaaacgccggcgctgaccatcaacgccgtgtgcggctccggcctgaaggccgtgatgctggcggcccaagccatcgcctggggcgacagcgagatcgtcatcgccggcggccaggaaaacatgtccgccagcccgcacgtgctgcaaggcagccgcgacggccagcgcatgggcgactggaagatggtcgacaccatgatcaacgacggcctgtgggacgtgtacaacaagtaccacatgggcatcacggccgagaacgtcgccaaggcgcacgacatcacccgtgagcagcaggacgccctggccctggccagccagcaaaaggccaccgccgcccaggaagccggcaagttcaaggacgagatcgttcccgtcgccattccgcagcgcaagggcgatccggtgatgttcgacaccgacgagttcatcaacaagaagaccaacgccgaagcgctggccggcctgcgtccggccttcgacaaggccggctcggtgaccgcgggcaacgcctccggcatcaacgacggcgccgccgccgtgatggtcatgtcggccgccaaggccgagcaactgggcctgaagccgctggcgcgcatcgccagcttcggcaccagcggcctggaccccgccaccatgggcatgggcccggtgccggccacgcgcaaggcgctggagcgcgccggctggcaagtcggcgacgtggacctgttcgagctgaacgaagccttcgccgcccaagcctgcgcggtgaacaaggagctgggcgtggacccggccaaggtcaacgtcaacggtggcgccatcgccatcggccaccccatcggcgcctccggctgccgcgtgctggtgacgctgctgcacgaaatgcagcgccgcgacgccaagaagggcgtggccgcgctgtgcatcggtggcggcatgggcgtgtcgctggccgtcgagcgctgataaatggaggcgctcgttgatctgagccttgccccctgacgaacggcggtggatggaagatactgctctcaagtgctgaagcggtagcttagctccccgtttcgtgctgatcagtctttttcaacacgtaaaaagcggaggagttttgcaattttgttggttgtaacgatcctccgttgattttggcctctttctccatgggcgggctgggcgtatttgaagcggttctctcttctgccgtta

SEQ ID NO: 159 - DNA, 1439 bp, Artificial Sequence
  Synthetic Construct- Sequence No. 159, Example 159: designer Nial-promoter-controlled chloroplast-targeted 3-Hydroxyacyl-CoA dehydrogenase DNA construct (1439 bp)
agaaaatctggcaccacaccatggtagggtgcgagtgaccccgcgcgacttggaagggttcaaacgaccccgccgtacgaacttttgtcggggggcgctcccggatggtagggtgcgagtgaccccgcgcgacttggaagggttcaaacgaccccgccgtacgaacttttgtcggggggcgctcccggatggccgccgtcattgccaagtcctccgtctccgcggccgtggctcgcccggcccgctccagcgtgcgccccatggccgcgctgaagcccgccgtcaaggctgcccccgtggctgccccggctcaggccaaccagatggagattcggaagatcggcgtgatcggcgcagggcagatggggtcgggcatcgcccaggtggcggcccagtcgggttacgaggtcgtgctaatggacgtcgaggagctgagcctcaagaaggggctcgaggccatccgaaggtcgctcgaccgcttcctgcgcaaggagaagatcacccaggaggaggccgaaaaggccctggcccgcatcaagacgacgctcaaccccgccgacttcgcggactgcgacctggtcgtcgaggccatcgtggagaacgagtcggtcaagggtaagctcttccagacgctcgacaaggtggtgaagcctgaggccgtcttcgcttccaacacctcctcgattcccatcaccaagctggccagctacacctcccgccccgagcgtttcatcggcatgcacttcatgaacccggtgccgctgatgaagctcgtcgaggtcatccgcggctacaagacctcggacgaggtcacccgggtggtcatggcgacggccgagaagatgggcaaggtgccggtcgaggtcaacgactaccccggcttcgtctccaaccgcgtgctcatccccatgctcaacgaggccatccaagcggtcatggagggcgtggccacccccgaggccatcgacaccgtgatgaagctgggcatgaaccaccccatgggcccgctgacgctcgccgacttcatcggcctcgacaccgtgctggccatcatggaggtgctgcacgagggctttggcgacagcaagtaccgcccctcgccgctgctcaagaagatggtccaggcgggtctgctgggccgcaagagcgggcaggggttctacaagtacgacgagaaggggaacaagatcggctagtaaatggaggcgctcgttgatctgagccttgccccctgacgaacggcggtggatggaagatactgctctcaagtgctgaagcggtagcttagctccccgtttcgtgctgatcagtctttttcaacacgtaaaaagcggaggagttttgcaattttgttggttgtaacgatcctccgttgattttggcctctttctccatgggcgggctgggcgtatttgaagcggttctctcttctgccgtta

SEQ ID NO: 160 - DNA, 1337 bp, Artificial Sequence
  Synthetic Construct- Sequence No. 160, Example 160: designer Nial-promoter-controlled chloroplast-targeted Enoyl-CoA Dehydratase DNA construct (1337 bp)
agaaaatctggcaccacaccatggtagggtgcgagtgaccccgcgcgacttggaagggttcaaacgaccccgccgtacgaacttttgtcggggggcgctcccggatggtagggtgcgagtgaccccgcgcgacttggaagggttcaaacgaccccgccgtacgaacttttgtcggggggcgctcccggatggccgccgtcattgccaagtcctccgtctccgcggccgtggctcgcccggcccgctccagcgtgcgccccatggccgcgctgaagcccgccgtcaaggctgcccccgtggctgccccggctcaggccaaccagatgacggttcgactggaatacgatggcgggttcgcgcacctgacgctcagccgcccgcaggtcctgaatgcgctcagtttcgagctgctcgccgagttgagccgggcgcttgccggcgtcgccgaatccgatgcgcgcgccctgatcgtcacgggcgagggcgacaaggcgttctgcgccggcgcggacattcccgagctgatgaatcggccgctcatgcaagagctcgaaggggccgcgaaaggccaggcggtgttcagccggatcgccgagctgaagattccgtctgtcgccgtcatccagggttatgccttcggcggcgggctggagcttgccctggcatgcacattccgcgttgccactgatcgcgcccgcatggggctgcccgaggtcaagctcggcctgatcccgggttatggcggaacgcagcgtctgccgaggctgatcggcgaggggcgcgcactcgacctgatcatgtccggccgcacgatagacggcggggaagccgagcgaatcggcctggtcaatcgcatagacaacgaggggacgcccctggagatcggcaagcggtttctggagccttatctcaagcacagtctctgcgccttgtattttgcccgcgaggccgtgcagaggggaggcggtgtcgccattgcggatggcctgcgcatcgagcgggatctttccacgctggcttaccggagccaggatgcggccgaggggctgcgcgcttttgtggaaaaacggcccgcgtctttcaaggactgctgataaatggaggcgctcgttgatctgagccttgccccctgacgaacggcggtggatggaagatactgctctcaagtgctgaagcggtagcttagctccccgtttcgtgctgatcagtctttttcaacacgtaaaaagcggaggagttttgcaattttgttggttgtaacgatcctccgttgattttggcctctttctccatgggcgggctgggcgtatttgaagcggttctctcttctgccgtta

SEQ ID NO: 161 - DNA, 1736 bp, Artificial Sequence
  Synthetic Construct- Sequence No. 161, Example 161:  designer Nial-promoter-controlled chloroplast-targeted 2-Enoyl-CoA Reductase DNA construct (1736 bp)
agaaaatctggcaccacaccatggtagggtgcgagtgaccccgcgcgacttggaagggttcaaacgaccccgccgtacgaacttttgtcggggggcgctcccggatggtagggtgcgagtgaccccgcgcgacttggaagggttcaaacgaccccgccgtacgaacttttgtcggggggcgctcccggatggccgccgtcattgccaagtcctccgtctccgcggccgtggctcgcccggcccgctccagcgtgcgccccatggccgcgctgaagcccgccgtcaaggctgcccccgtggctgccccggctcaggccaaccagatggccggcgcgcagcaggatcttgccgctgcgtccgggcttgtcgctggccgcggcggccttggcggcatcgtgcaggtcgaacaccgcttccaccggcagcgccaggctgccatcgagcgcggcggtgagcagttcgccgatcatgcggcgcttgtcctcggccttggtggcctgcatcaccttgctgccccagaagccacgcacggtggcctgcttgaagatcacatcgccgctggatatctgcagcggctcgccggtcatcgagccaaaggaaatcagctcgccgccttcggccagcaaggccatcagctcacccgctgcattgccggccaccgaatcgatggcgcgcacgatgggcgcatcgccggccagcgcgcgcaccttgtcctgccagcctgcttgcgcagtggagattgcgttgccgatgcccagcgctttcagctcgtccacgccggcgtcgcggcgcaccaggttgatcacgttgatgccgcgtgcggcggcgagcatcgccaccgtcttgccgaccgcaccgttggcggtgttctgcacgatccagtcgccctgtttcacctgcaggaattcgatcagcatcagcgcgctcagcggcatggcgatcaactggcaaccacgctcgtcgtccaggccatccggcaacggcaccacgccggaggcgtcggcaaggaagtactcggcccaggcctcatgcacaccggcggcgaccacgcgctggccaacctgcaagccctcgacaccctcacccagcgcatcgatgacacccgccgcttcgctgccgccgatggctggcagttccggcttgtagccgtaattgccgcgcacggtccacaggtcatggttatggatcggcgcgcgccgcatcgcaacgcgcacctggcccttgcctggctgcggcgtggggcgctcgcccagttcgagcaccttggccggatcgccgaattgggtatggatggctgcgcgcatggaggtctcctgccgggcacgctcttgctgcgacgcgcccgatcgttgtgaaaggtggcgcgatgctatcggcagggctgcaaggaagggatgaagcgaacggaactgctgtgtgaagttgttggcgtgcgcgcgtagtgacgatgctctgctgcagcgccggaggactgcgtgcaggccgaccctcattaaatggaggcgctcgttgatctgagccttgccccctgacgaacggcggtggatggaagatactgctctcaagtgctgaagcggtagcttagctccccgtttcgtgctgatcagtctttttcaacacgtaaaaagcggaggagttttgcaattttgttggttgtaacgatcctccgttgattttggcctctttctccatgggcgggctgggcgtatttgaagcggttctctcttctgccgtta

SEQ ID NO: 162 - DNA, 2036 bp, Artificial Sequence
  Synthetic Construct- Sequence No. 162, Example 162: designer Nial-promoter-controlled chloroplast-targeted Acyl-CoA Reductase DNA construct (2036 bp)
agaaaatctggcaccacaccatggtagggtgcgagtgaccccgcgcgacttggaagggttcaaacgaccccgccgtacgaacttttgtcggggggcgctcccggatggtagggtgcgagtgaccccgcgcgacttggaagggttcaaacgaccccgccgtacgaacttttgtcggggggcgctcccggatggccgccgtcattgccaagtcctccgtctccgcggccgtggctcgcccggcccgctccagcgtgcgccccatggccgcgctgaagcccgccgtcaaggctgcccccgtggctgccccggctcaggccaaccagatggatgacgataatgttgtaaaacccatttactatggtaaaatagaggttcaaaataatggcacgggagtatgggagcctaccgttgagtggttgaatgagtttttaaaccggagtatggaactatcacagagtcttttacaactaggctttagtagaagggttagagtgttgagcgagatggggaagatttggagggagaagctttcgttagtcgaggagaaactagctcctaatatttctaagaatacaggctacagcgtggagaatgtgaaaatggacttaagactggttgaagaagtgtttaatgagaccaatattgttgagctcttcgataaaggcttaatcgggggatggcgtagtcttgacaagcccgttgaaatcattgatggggagttcgtgtggaatagaccgctaggcgtatcccttataatatcctccggaaacaccgtcataccagctattctcccagcagtggtttctttagcatcggggaacgtaactatactaaggccgtctttcagcaactaccaagcagtagtcgaaatttttaaaacacttttcgatctagcagacagctccgtagaaggtgctagagaaatggcttcggctcttctggtcgcatactttaaacatgagagcaaggtatttgaacacctattagcatcagcacctctcggcatcgtcaattactggggcggggagccaggtagaagcgtgatcgctagtagggttttgaagaatccgtttcatcctaagttaatcgtcaatggacctctaacggggttagcgataatagatgaagagtcagcgtcggaaaaagtagcctacggattagcgagggatgtggtactgtatgatcaacagttatgtagctctcccacttacgccatattcataggttcgaaagatagcgcgttgaagtttgcacagagactaggggaagccctgaataatgtggggagaaggttcccccgtgatttgaaggaaggagaactgtacaatttaatactgcttaggaaaaaccttgagatccaaggtgtgagagttttctactcggaaaaccccggaaatgcttggacgattgcggtgaaaacactagagtcagtcactaattttgcatatagtttaaaatatccacatacaatccctaggagacggttcattgaaataatagtgttgaaagacgccaaagaactcaaggagacgatcttacacctaattgaagacttgaggagaaacggggttgataagttccagacagcatcgataaaggtttctgaaagaaaccttaaccacttattgaaggttctctatattcttgggatttacagggttgtcccaataggggaatccttttttagaacgccgttagaaccgtacgatggtgaattcttacctaaatacttcacttacacgatgtatcttagatttatcgagaagtcggatgcgctaaaacaccctgaatgataaatggaggcgctcgttgatctgagccttgccccctgacgaacggcggtggatggaagatactgctctcaagtgctgaagcggtagcttagctccccgtttcgtgctgatcagtctttttcaacacgtaaaaagcggaggagttttgcaattttgttggttgtaacgatcctccgttgattttggcctctttctccatgggcgggctgggcgtatttgaagcggttctctcttctgccgtta

SEQ ID NO: 163 - DNA, 1625 bp, Artificial Sequence
  Synthetic Construct- Sequence No. 163, Example 163: designer Nial-promoter-controlled chloroplast-targeted Hexanol Dehydronase DNA construct (1625 bp)
agaaaatctggcaccacaccatggtagggtgcgagtgaccccgcgcgacttggaagggttcaaacgaccccgccgtacgaacttttgtcggggggcgctcccggatggtagggtgcgagtgaccccgcgcgacttggaagggttcaaacgaccccgccgtacgaacttttgtcggggggcgctcccggatggccgccgtcattgccaagtcctccgtctccgcggccgtggctcgcccggcccgctccagcgtgcgccccatggccgcgctgaagcccgccgtcaaggctgcccccgtggctgccccggctcaggccaaccagatggaactcgacctcgacggtcccggggttggtgaagtgctgatcaagtacaccgccgcggggttgtgccattcggacctgcacttgaccgacggggacctaccgccgcgctatccaatcgtcggggggcacgaggggtcaggcatcatcgaggacgtcggacctggggtcaccaaggtcaaaccaggcgatcacgttgtttgcagcttcatcccgaactgcggaacctgtcggtactgcgccaccggacgctccaacctctgcgatatgggcgccaccatcctcgaagggtgcatgcccgacggcagttaccggttccacagtaacggcctggatttcggtgcgatgtgcatgctcggcacattctccgaacgcgcaactatctcccagcattcggtggtcaagatcgacgactggctgccgctcgagaccgcggtggtcgtcggctgcggcgtgccgactggctggggcacctccgtctatgccggcggggttcgttgcggtgacaccaccgtcatctatggcgtcggcggcctgggagtcaacgccgtccaaggcgcggtgagtgcgggcgcgaagtacatcgtggtcgtcgatccggttgcgttcaaacgcgacaccgcgctcaagttcggcgccacccacgcgttcgccgacgccgccaccgccgcggccaaggtcgacgaactgacctggggacagggtgccgatcaggcgctgatcctggtcggcaccgtcgacgaggacgtggtctcggcggcgactgcggtgatcggtaagggaggcaccgtcgtgatcaccggactggcggacccagcaaagctcacggtgcacgtttcgggaacggacctgacgcttaacgagaagacaatcaagggcacgttgttcggctcgtccaatccgcaatacgacatcgtacggctgctccgtctctacgacgccggccagctaaaactcgacgatctgatcaccacccgatacacgctcgaccaggtcaaccagggctaccaggatctgcgagacggcaagaacatccgcggcgtgatcatccacgcctgataaatggaggcgctcgttgatctgagccttgccccctgacgaacggcggtggatggaagatactgctctcaagtgctgaagcggtagcttagctccccgtttcgtgctgatcagtctttttcaacacgtaaaaagcggaggagttttgcaattttgttggttgtaacgatcctccgttgattttggcctctttctccatgggcgggctgggcgtatttgaagcggttctctcttctgccgtta

SEQ ID NO: 164 - DNA, 1249 bp, Artificial Sequence
  Synthetic Construct- Sequence No. 164, Example 164: designer Nial-promoter-controlled chloroplast-targeted Octanol Dehydrogenase DNA construct (1249 bp)
agaaaatctggcaccacaccatggtagggtgcgagtgaccccgcgcgacttggaagggttcaaacgaccccgccgtacgaacttttgtcggggggcgctcccggatggtagggtgcgagtgaccccgcgcgacttggaagggttcaaacgaccccgccgtacgaacttttgtcggggggcgctcccggatggccgccgtcattgccaagtcctccgtctccgcggccgtggctcgcccggcccgctccagcgtgcgccccatggccgcgctgaagcccgccgtcaaggctgcccccgtggctgccccggctcaggccaaccagatgttgggaggccaagaagccgctggtgattgaggacattgaggtggcgccacctcaggcttggcaggttcgcatcaagattacagccactggcgtttgccacacggattctttttcgttgagcggctctgatcctgagggtctctttcccgtggtccttggccatgagggcgccggcatcgtggagagcgttggcgagggcgtaaccaactttaaggccggcgatcatgtcattgccctctacataccccagtgcaatgagtgcaaattctgcaagagcggcaagacaaatctctgccagaagattcgcctcacccagggcgctggtgtcatgcccaatggatcctcccgcttgtcgtgcaagggtcagcagctgttccatttcatgggcacctcaactttcgccgagtacgcggtggtggccgacatatcggtgaccaaaatcaacgagtcggctccattggagaaggtgtgccttctgggctgtggcatttccacgggctatggtgccgccttgaacacctttaggtggaacctggcagcacttgcgccgtctggggtctgggtgctgttggactggcagtgggtctgggctgcaagaaggctggcgccgccaaggtctacggcatcgacatcaatccctccaaattcgagctggccaggaagttcggcttcaccgactttaaatggaggcgctcgttgatctgagccttgccccctgacgaacggcggtggatggaagatactgctctcaagtgctgaagcggtagcttagctccccgtttcgtgctgatcagtctttttcaacacgtaaaaagcggaggagttttgcaattttgttggttgtaacgatcctccgttgattttggcctctttctccatgggcgggctgggcgtatttgaagcggttctctcttctgccgtta

SEQ ID NO: 165 - DNA, 1769 bp, Artificial Sequence
  Synthetic Construct- Sequence No. 165, Example 165: designer Nial-promoter-controlled chloroplast-targeted Short Chain Alcohol Dehydrogenase DNA construct (1769 bp)
agaaaatctggcaccacaccatggtagggtgcgagtgaccccgcgcgacttggaagggttcaaacgaccccgccgtacgaacttttgtcggggggcgctcccggatggtagggtgcgagtgaccccgcgcgacttggaagggttcaaacgaccccgccgtacgaacttttgtcggggggcgctcccggatggccgccgtcattgccaagtcctccgtctccgcggccgtggctcgcccggcccgctccagcgtgcgccccatggccgcgctgaagcccgccgtcaaggctgcccccgtggctgccccggctcaggccaaccagatgatcatcaaaccgcgcgtgcgtggcttcatctgcgtgaccactcatccggtcggctgcgaggccaacgtcaaggaacagatcgactacgtgacttcgcacggcccgatcgccaacggcccgaagaaggtgctcgtgatcggcgcgtcgaccggctacggcctcgcggcccggatctcggccgccttcggctcgggcgcggacacgcttggcgtgttcttcgagcgcgccggcagcgacaccaagccgggcaccgccggctggtacaacagcgccgcgttcgagaaattcgccgccgaaaaggggctctatgcgcgcagcatcaacggcgacgcgttctccgacaaggtcaagcagatcacgatcgacacgatcaagcaggacctcggcaaggtcgatctggtcgtctacagcctggccgcgccgcgccgcacgcatccgaagacgggcgagacgatcagctcgacgctgaagccggtcggcaagtcggtgacgttccgcggcctcgacaccgacaaggaaacgatccgcgaggtgacgctcgagccggcgacgcaggaagagatcgacggcaccgtcgccgtgatgggcggcgaggactggcagatgtggatcgacgcgctcgccgacgccggcgtgctggccgacggcgcgaagaccaccgcgttcacgtatctcggcgagcagatcacgcacgacatctactggaacggctcgatcggtgaggcgaagaaggatctcgacaagaaggtcgtgtcgatccgcgagaagctcgccgtgcatggcggcgacgcgcgcgtgtcggtgctgaaggccgtcgtcacgcaggcgagctcggcgatcccgatgatgccgctgtacctgtcgctgctgttcaaggtgatgaaggaaaagggcacgcacgaaggctgcatcgagcaggtgtacgggctgctgaaggacagcatgtacggcgcgacgccgcacatcgacgaagaaggccggctgcgcgcggactacaaggaactcgatccgcaggtgcaggcgcaggtcgtcgcgatgtgggacaaggtcacgaacgacaacctgtacgagatgaccgacttcgccggttacaagaccgagttcctgcgtctgttcggcttcgagatcgccggcgtcgactacgacgcggacgtgaacccggacgtgaagatccccggcatcatcgacacgacggcctgataaatggaggcgctcgttgatctgagccttgccccctgacgaacggcggtggatggaagatactgctctcaagtgctgaagcggtagcttagctccccgtttcgtgctgatcagtctttttcaacacgtaaaaagcggaggagttttgcaattttgttggttgtaacgatcctccgttgattttggcctctttctccatgggcgggctgggcgtatttgaagcggttctctcttctgccgtta

SEQ ID NO: 166 - DNA, 6110 bp, Artificial Sequence
  Synthetic Construct- SEQ ID NO: 166, example 166: a designer hox-promoter-controlled Formylmethanofuran dehydrogenase (Fmd) DNA construct (6110 bp)
agaaaatctggcaccacaccgcagaaatataggggctaggagttgagggtactctggttcgtcaagcatttgggatgatttcccctcacaagttcctcaaattattctcctataaacaatagatataaggtcaaaacttgagttatgagtgctgagtaaaaaattactctccacgcctcagaggtagatatgatgagcgtctataaaaatgtgacatgtcccgtctgcggagggtcttgtgatgacatagaggttctctatgatgggaaaacaataaaaacaaggaatgcttgcaggatggggaatgcaaagtttcaggagatggtcagctcccacagaatacttagaccccagattaaaactgaaagtggtttcagatccgcagaatgggatgaagcccttgacgctgcagcagagatacttacagagtcaaaaagaccaaccctattcatgggtagtgagatgtcaactgaagccatggctgcaggtcttgaacttggtgagtatctaaatgccatggtggattcaaatgcaaccatatgtcatggccccacattaatgggaatccaggaagctggacagagcgctgctacggcaggtgagataaagaatagagctgacgtcatcatttattggggtacaaatgttatggactccatgcctcgccacatgtcacgttacagcatattcatgcgcggatttttcagagaacgtggtaaaaaagatagaactgtcatctccgtggatccccgtgaaacagcaacaactaaagcctccgatatccatctgcagctgaaaccaaactcagattatgaacttttttcagcactgcttacagttataaggggcaatgaaccgcacaggagtattgagagtataacagggatatcagttgaaaccataaaggaagtcgcagacataatgctgaatgcgcagtttggagccatctatggaggtcttggacttgcatcatcagaaggtaagcatagaaacgttgagatggttctcaaactggtagctgcacttaatgaacacaccaaatttacaataggagccataagaggtcattgtaatgttgcaggatttaatcaggtggcttcatgggagtatggtttcccctttggtgttgattttacaaggggttatccacgctacaaccccggagaaacaactatagtcgatcttctccagagaaaagaatccgatgcggtcctcgttatatgttcagatcttggagctcacctccccaaagaatgcgttgagtatatgaaagagattcctgtaatatgcatagatattgccccatgtccaacaacacttgtatctgatgttgtgatccctggagttattgatgctatggagtccagcggcaccttctaccgctttgacaatgttcccatccaccataaggcattcacaacatcaccattccctgaaacagagagcaacgaacatactcttagacagatccttgagagggttaaatcaattaaaggcgaataaatgggatttgtgttggtaccaaaatcagatttccagatacctctggaagcagataccataagacccgatctgtttgaagggctggatcttgatgaaattcgttcccttcaagtatacgaagggaacatcaaaagacccctaggcgaattttttgagatagcagagacatcccatgaagatcagttaatacggatcgatggggatgtcagcagggtgaagtatatcggttcagggatgaaatccggaaaaatcatcataaacggcgatgtcggactccagcttggctgtgaaatgaaaggcggtgaaatagaggtaaatggaaatgtttcttcatggatcggcatggaaatgcatggtggcaccataaaaattaatggaaacgcgggggattatgttggctgcgcatataggggagagtggcgtggcatgaaaggaggtaaaatcattatacagggtaatgcagggaacaatattgggggtggtatgatggccggagaaatttatataggtggagatgcaggtaatttctgcggcatccgaatgaatgggggtgaaataacagtacgcggggatgctggaagggcccccggagcagagatggtatcaggtatcatcaaaattcatggacggatctcctctctcctcccgggattcaaggagatctcaacattcaaagaagatggatcccttatgatcctattcaaaggagatctatccgaaaaaaatccggagggtaatctatacatcaattataataagaaccttcacattctagagaatgagaccgatgaagggagagtcatcacaaaaaagggaattaaagtaatctacaacagtggaagtacgatccgtgaagggcagataataaagggaggcaataaactcacagatgattatatagatgaatgtgcacgctgctgtattagtcctgaagactataagctcctaggtgaacccgaaaatgttgtcgtatcatcacatggaaatgaagttgttctgagagctgttgaggaccctggaatccagatgggaacaatattcatacccagaggtatatgggccaatgtgctaacgccaccgtataccgagtcaaccggttccccaatgtataaaggagtgccggtttatcttagaaaggcttcacaaggtgaaaggatcctgagtgccgaggaacttgtagaggaatacggggtgggaaaatgagtggggcaggtcagagaataccttgatttaataaaaaatttcagtgggttcgcaagcccgggcagtgtcataggagctcatatgttactaatagccaggaaggtccttgattttgaagtcgatgaagaaatttatgttacatgtgaaacgacaaactgtttacccgacgcattccaggccatatgcaaatcaacaataggaaatgggagactgaatatcctggacactggaaaaatggctgtcatcatcaacagaaagggtatgcctggagaaacagtccaggctcttagaataatactggatcctgaaaagaccgtcaattacccgatcatacatgaatggtacatgaacacccgcaaggtatccgcagaagaagtgaatccagaactcataagagccggtgaaaatctatattcctggtattttgttgatgtgatcgttccagaaaaagaaaagaagataattgaaatctgtaatctttgcaacgaacctttcataaaaagaaatgagctggatctctgtccagcttgtctgaaaagataaatggaatatattttaaaaaatggtattgtatttgatccagcaaataatattgatggagaaaaaaaggacatactaataaaagatggatacatagttagtgaagtatcaaaggatgcaaagattatagatgttacaaataaattagtaatgcctggaggagtagatttacactcacacatagcaggaccaaaactatcagtgggaagattatatcgtccagaagatacaagacgtggaataaaacctgcaccatgtggtgctattgagggatttgaagcaggattttccataccaacatgtccaacaactgggtacaggtatactcgtatgggatatacaacagtaacagaagcagcagtaccacccttagaggcaaaacatgcacatgaagaaataaacagtattccaaaccttgatataccaacattaacactctttggtaataactggttcatgcttaaatatgttaaggaaaataacttagaaaaactagctttattcatatcaaaatggttgaaactagcaaagggttatggaattaaaatagtaaatccatgtggaagtgaagcatggggttggggaaaaaatgtagatggacttgatgatccagaaccacactggggtgtaacaggacgtcaagtaatacaggctctaactaaagtaaatgaaaaattaggtttaccccattctgtgcatgttcatacaaatgaccttggacatcctggaaactatgaaacaacacttgaaacatttgattgtgtaaaggatattaagaaaaataagaatgtaacaagagatcaagtgttacatgcaacacacgtacagttccatgcatataagggaacatcatggagggatgttacatcaggtgcaccagaattgattgattatataaataagtcaaaacatatgacttgtgatattggacagataaccttcgatgaaacaacaacaatgactgcagatgcaccaatggagtatgatttatacagactaacaggacttaaatgggcaaataaggatatagaggttgaaacttcatctggacttattccatcaatatattctaaacgagcaccagtaagtgtacttcaatgggctattgggcttgaattcttccttggaataaaagatccatggaaattggcattaacaactgattcaccaaatggtggtccatttatcagatatccacgtgtaatttcatggataatgagtaatgaaaaactaaatgatatgcttgataatcaagtacatagttgggcaacaagaagaacatcacttggaagttatgatagggaatattcctggaatgaaatagcaacaattacaagggcaagtccagcaaaaatacttggattaacagatagaggacatcttggtgtaggtgcaaaggctgatgtttcagtatatgatatagatgtctatgactttgatacaacacttcttaaaaattcacaaacacttgaaaacaagttattaaacagtttatacactataaaagatggtatgatcatggttgatcatggaaaaattgttaaattagtagatagtaaacatatatggactaatgtttgtggcttagaaaaagaagaggctaatcttgtagatgaaataacaccagaatttaataagtattatactataaaatatgaaaattatggtgttccagatcattatataaaacctgatacttgtgtagatatagaatatgaggattagatggatgaaatggatattatcataaatacaggtacgagtattatccaagcattttatgaaaagaaaggttctacattaaaggatgaatacagacaatctacagctgtagcttttatggatccaagggatatgaaaaaattatctctaaaaccacgtgataaaataaatgtaacatctaaatggggaagtgtaacaatatatgcagataaatcccatgatgcaccacatgaaggtatgatattcataccaaggggaccatgggccaatatagtaataagtccagaaacatattgctgtaatattccaacatataagggagtaaaagcagtaattaaaaaaacagacgatgaagtattactcgtagcaaatctaatgcataaaacatacaataaatataaatataacacaaaaactcttggacaaaagccagtatataaaaaaataggggagtaaatgttatgtgttaatcaagatcattgtttagggtgtggagcatgtgttatagtatgtcctgttaatcaagaaatctatccagaggttattggaggtaatgggccagatacaacagatgtggtaatgttagttgaaaatggagtaataaaactattccatccagaaaaatgtgtaacatgtatgaaatgtaatgatacatgtccaacaaaggcaatatatcataagggagactaatgaagtaagtaggaagcagggagcaggggaaagaaaattgacaactgtacaagattaatcgcgtctctgagcaatgaccaaatacatctacctccacggttttcttccagccccctatctgcgaaagcacaagatattagcaagcgtttcgcccaaattcacatacagctaacaatccctgatctcaatgctggtgaattttctcagttaacaatcacgcgccaaattcaacaagttgccgcaattttccctgataattctgaaccaataacgctgataggttctagtttaggcggtttaactgctgcttatctaggacagcgatatttacaagtacaacgcttagttttattagcgccagtttggttttttatcccattggttgcccaaaatgggtgaagaagctgtcacaagttggcaacaaacgatataggttctctcttctgccgtta

SEQ ID NO: 167 - DNA, 1538 bp, Artificial Sequence
  Synthetic Construct- SEQ ID NO: 167, example 167: a designer hox-promoter-controlled Formyl transferase DNA construct (1538 bp)
agaaaatctggcaccacaccgcagaaatataggggctaggagttgagggtactctggttcgtcaagcatttgggatgatttcccctcacaagttcctcaaattattctcctataaacaatagatataaggtcaaaacttgagttatgagtgctgagtaaaaaattactctccacgcctcagaggtagatatgttagaagaggtcatggagtttgatctggtatgctccaaggttgccgccgtagttccctgcacttatcttaattatgcctggaacggtacatgcggcctttataccttccttcattgcctcccttacaacctcttcgttgacaccgtctataactatctcatataccccgttgacgttttcaggtatctcgctgccctcaacctcatccttgagtgtcacgcacatcttctcattggttgaggcgttgaggaacttgtacttgtttgatccaacctttgaacctgaagccaccacaccaccggggaatggtgttaccgtgccttcaactgcggctattgcatccactgcagcctgggccgcaaggagggctgatgcctgactgtcacccatgatgaagaagtttccgcctgcaaccccgtcctttattccaaattcgctttcaatgaggaagtcgcctgacattatcgggattgagtggattttccttccatcaatttcaagttccttctcgtagccatccccgaagaacttgagtttgaatcccacattgagcttctcgtcctcgtcatcgagagcatcgaatactgcggttgttggtgctgtaagtatacccatccctatcctttcaaggagttcatggtccaggttcttctttgatgggttgcagatcattattatgtatccgggccttccatcgggtgtctcctctggtggaacgtagcagtctatacctgcctctgcagggcaccctataacagatgtaccgtaacctgttgcctcggttgcagctatctttgcaagttttttggttgctgcagttacaaggacccttgaaaccttgataccgaaggcctccgcaaatgtatcctctatttcaacaccatttatctccattgaagtaagtaggaagcagggagcaggggaaagaaaattgacaactgtacaagattaatcgcgtctctgagcaatgaccaaatacatctacctccacggttttcttccagccccctatctgcgaaagcacaagatattagcaagcgtttcgcccaaattcacatacagctaacaatccctgatctcaatgctggtgaattttctcagttaacaatcacgcgccaaattcaacaagttgccgcaattttccctgataattctgaaccaataacgctgataggttctagtttaggcggtttaactgctgcttatctaggacagcgatatttacaagtacaacgcttagttttattagcgccagtttggttttttatcccattggttgcccaaaatgggtgaagaagctgtcacaagttggcaacaaacgatataggttctctcttctgccgtta

SEQ ID NO: 168 - DNA, 1631 bp, Artificial Sequence
  Synthetic Construct- SEQ ID NO: 168, example 168: a designer hox-promoter-controlled 5,10-Methenyl-tetrahydromethanopterin (H4 methanopterin) cyclohydrolase DNA construct (1631 bp)
agaaaatctggcaccacaccgcagaaatataggggctaggagttgagggtactctggttcgtcaagcatttgggatgatttcccctcacaagttcctcaaattattctcctataaacaatagatataaggtcaaaacttgagttatgagtgctgagtaaaaaattactctccacgcctcagaggtagatatgatgagtgaaagtatgaacatagcagcaaagaaaattgctgataaaatggttcaagatgcagaaaaattaaaagtaattccatcaacattatccaatggaacatctattatagattgtggtgttaatgctaagggaagtattaaaggtggggaattatttacaaaagtatgtcttggtggaatttgtgatgttggaatttcaatacctggtgacttaagtgatataatggctatgcctgctgttaaggttaaaactgattttccagcattaaccactcttggttctcagaaagcaggatggaaaatagatgttaatggatattatgctataggttctggacctgctcagacacataaatttaaagataataacatttataaaataactaactatattgaagattcagatattgcagttattactcttgaagcagataaattacctgatgaagatattgctaattatattgcagatgagtgtggtgtaaaaccagaaaatttaaccatacttgttgcacctacatcttctcttgttggatctattcaaatatctggtagagctcttgaaactggaatatacaaaatgtatgaaataatgaacttcgatgttactaaaattacatatgctgcaggtattacccctattacaccagttgatcctgatagtcttaaagctatgggtaaaactaatgatgctatcatgtttggtggaagagcatattattatattgaacctgatgaaggtgaagatttagaagaattagctgctaatttaccatcatctgcttctgataattatggtcaaagctttattgaattatttaaagaagcaaatcaggatttctataaaatgcctaaggatatttttgcaccagcacaagttattgttaatgatatgataactggtcaaatgttccacacaggatttatagatcttaaacgtctaaaaaaatcttttgaagttaaagaaataatttatgaaaaataatgaagtaagtaggaagcagggagcaggggaaagaaaattgacaactgtacaagattaatcgcgtctctgagcaatgaccaaatacatctacctccacggttttcttccagccccctatctgcgaaagcacaagatattagcaagcgtttcgcccaaattcacatacagctaacaatccctgatctcaatgctggtgaattttctcagttaacaatcacgcgccaaattcaacaagttgccgcaattttccctgataattctgaaccaataacgctgataggttctagtttaggcggtttaactgctgcttatctaggacagcgatatttacaagtacaacgcttagttttattagcgccagtttggttttttatcccattggttgcccaaaatgggtgaagaagctgtcacaagttggcaacaaacgatataggttctctcttctgccgtta

SEQ ID NO: 169 - DNA, 1475 bp, Artificial Sequence
  Synthetic Construct- SEQ ID NO: 169, example 169, a designer hox-promoter-controlled 5,10-Methylene-H4-methanopterin dehydrogenase DNA construct (1475 bp)
agaaaatctggcaccacaccgcagaaatataggggctaggagttgagggtactctggttcgtcaagcatttgggatgatttcccctcacaagttcctcaaattattctcctataaacaatagatataaggtcaaaacttgagttatgagtgctgagtaaaaaattactctccacgcctcagaggtagatatgatggttgtaaaaattggtataataaaatgtggtaacatcgggacctcacctgtgctggacctgttacttgatgagagggcagacaggccaaacatagatgtctgtgtcgtgggttcaggtgcaaaaatgaaccccgatgaaatcgaaagggcagtaccaaccatgcttgaaatggagagggactttgttatattcataagcccaaaccccggtgcacctggccctgcaaaggcaagggagctcctttcagcggctgatgttccagccatgatcataggtgacgcaccaggcctcagggtcaaggatgaaatcgaggagcagggacttggatacataatagtaaaggccgacccgatgataggggcaagaagggagttcctggacccaacagagatggcatccttcaactccgacgttataaaggtccttgcattcacaggcgcatacagggttgtgcagaacacaatcgatgcaatgattgcagatgttgaagccggaaaggcacctgaacttcctcaggtggtaatagacacagataaggcggttgaggcagcaggctacaccaacccatatgcaaaggccaaggccatggctgcatatgagatagcaaccaaggtggctgacatagacgtcaggggctgcttcatggtacaggaccctgaccagtacataccaatcgttgcctcagcacacgaaatgctatctgcagctgccaaacttgcaattgaagcaagggaaatcgaaaaggccaacgacaccgtgctgagaacaccacacggtaaggaaggcaaaacacttagcaagaaggatcttctggccaagccagaatagtgaagtaagtaggaagcagggagcaggggaaagaaaattgacaactgtacaagattaatcgcgtctctgagcaatgaccaaatacatctacctccacggttttcttccagccccctatctgcgaaagcacaagatattagcaagcgtttcgcccaaattcacatacagctaacaatccctgatctcaatgctggtgaattttctcagttaacaatcacgcgccaaattcaacaagttgccgcaattttccctgataattctgaaccaataacgctgataggttctagtttaggcggtttaactgctgcttatctaggacagcgatatttacaagtacaacgcttagttttattagcgccagtttggttttttatcccattggttgcccaaaatgggtgaagaagctgtcacaagttggcaacaaacgatataggttctctcttctgccgtta

SEQ ID NO: 170 - DNA, 2594 bp, Artificial Sequence
  Synthetic Construct- SEQ ID NO: 170, example 170: a designer hox-promoter-controlled methylenetetrahydrofolate reductase and/or methylene-H4-methanopterin reductase DNA construct (2594 bp)
agaaaatctggcaccacaccgcagaaatataggggctaggagttgagggtactctggttcgtcaagcatttgggatgatttcccctcacaagttcctcaaattattctcctataaacaatagatataaggtcaaaacttgagttatgagtgctgagtaaaaaattactctccacgcctcagaggtagatatgctactctaccttgggacggggatacaggccggcttccttgacgatggtggggatgatatcttcccacatgacggccatgatatggacgccggctacaccctcgatggactgcaggtgtttaatctgttccacacagatggccaccccttcggccttggggtcggaggctttttccatgcggttgacgatttcgtcggggacaatcatcccggccaccgattgttgcatatatttggcggcccgggcggatttcaggggcatgacgccggcaataattttggctcttttatgcaggccgcgctcccggaccagggccataaagcgttcaaaacgctccatatcaaaaatgcactgggtttgaataaagtcggcgccggcattgatcttcttctccaggcgcatgacccggaactcaaaggggtcggcaaaggggttggcggcggcgccgatgaagaagcggggttcctggcccttaatctcttcaccgcaggcgaattttttctcatcccggaggtccttcacgatccggatcagctggagggaatccacgtcatggacgtttttcgccgtcggatggttaccaaaagattgatggtcgccggacaggcagaggacgttccgcatccccaggctgtaggcacccaggagatcactctggagggcgatacggttgcggtcccgaaccgtcatctggataatgggttcgcccccggcctggaggacgtggaccccagcggcgatactcgacaggcggacgatggccgtctggttgtccgtcaggttcatggcatcaacgtagtccttgaggagagcggcgtgcttcttgatctctgtaggatcggcgtgcttcggcggtccaatctcaccgctgaccagaaattgcccctgggagaggattttcgccatcttgctttcaaccatatgaccattaaaaaagttgcaatcttgggagcaggatgttacagaacacatgctgcaacaggaatcaccaactttgcaagagcatgcgaagttgcggaaaaagttggcaaaccggagatagcgatgacgcactccacaattgccatggctgcagagttgaaatacctggctggaatagacgatatcgtcatctcggatccgtcatttgccggtgaattcactgttgtgaaggacttcgattacaatgaagtcatcaaagcccacaaagacaatcccgaaacgattatgccgaagatcagggagaaggttaacgaactcgccaagacagttccaaaacccccgaagggcgccatacactttgttcatcccgaagacctaggcctgaaggtaacgactgacgacagggaagcagtacgtgatgcagacctgataatcacctggctgccaaaaggcgacatgcagaaaggcattatagaaaaattcgcaggagatatcaaagagggagcaataatcacccacgcctgtacgattccgacaacccttttctataagatattcgaggaactcggtatcgcagataaggtggaagttacatcctatcaccccggctcagttcctgagaacaagggccaggtctacatcgcggaaggatatgcctcagaagaagctatcaatacaatatacgaacttggaaagaaagcccgcggacatgccttcaaacttcctgcagaacttatcgggccggtatgcgacatgtgtgcagcacttaccgctataacctacgccggactgcttgtataccgtgatgccgttatgaatattctcggtgcacctgccggattcagccagatgatggcgacggaatcactggaacagatcaccgcctatatgaagaaggtaggcataaagaaccttgaagagaaccttgacccgggtgtattccttggaactgcagactcaatgaacttcggacctatcgccgagatccttcccacagttcttaaatcacttgagaaaagggcaaaataatgaagtaagtaggaagcagggagcaggggaaagaaaattgacaactgtacaagattaatcgcgtctctgagcaatgaccaaatacatctacctccacggttttcttccagccccctatctgcgaaagcacaagatattagcaagcgtttcgcccaaattcacatacagctaacaatccctgatctcaatgctggtgaattttctcagttaacaatcacgcgccaaattcaacaagttgccgcaattttccctgataattctgaaccaataacgctgataggttctagtttaggcggtttaactgctgcttatctaggacagcgatatttacaagtacaacgcttagttttattagcgccagtttggttttttatcccattggttgcccaaaatgggtgaagaagctgtcacaagttggcaacaaacgatataggttctctcttctgccgtta

SEQ ID NO: 171 - DNA, 2819 bp, Artificial Sequence
  Synthetic Construct- SEQ ID NO: 171, example 171: a designer hox-promoter-controlled Methyltetrahydrofolate:corrinoid/iron-sulfur protein methyltransferase DNA construct (2819 bp)
agaaaatctggcaccacaccgcagaaatataggggctaggagttgagggtactctggttcgtcaagcatttgggatgatttcccctcacaagttcctcaaattattctcctataaacaatagatataaggtcaaaacttgagttatgagtgctgagtaaaaaattactctccacgcctcagaggtagatatgtcaggccttaatcttcccggcccgggcggcagatatatactccaggcagtattcatcctggccgtacagggcggtggcggcccgcaacaggcccattaatggcatatccaggggatcaaggataaaggaatccatacctttagtgaggcacataaccataaaggcccggttcagcagtcgcctttccggcaggccataggaaacgttggaaaggccgcagatggtgtgaaccccggggtatttttgccgcagggcggcaaccgattccagagcctccacgccgtactggctgttaactcccaggggtttaatcaggggatcaaggtagatatcgtcttccggtatgccggcctctaccagcccgggtaccagcttaccagcaacgcgaaggcggtcctctaccgaatccggcatgccgccgtcatccatgcaaagggcgataaccttagccttatatttctgcactaaaggcaaaacttcctcccagcgctgcttctcggcggtgatggagtttaccattgcctggcccttatgggctgccaggccggcagccagggcctcggcgctggggctatcaatacacaggggaacatcaacgacttcctggacgatattcacgagccaggtcattaccttattttcttcgccgatgcttgtcccgcagttaacatcgataatatcggctccggcctcggcctgcttcctggccagttcctggatataatccttatcccggttagcaatagcctgggcaatggctttgcggctggagttaattaactctccgacaacgagcatttgcaggtaactgccatggatgtataccgattacttccaaaaacaaactgtggtaaatgtgacgagtcatcatgcatggccttcgccacaaaactcatagaaaaggaactcacactggatgactgcccgcagctcagtggggatgaaagacagaagctcgaggacctccttgcgccggctgtgagggaaatcaccttcggcccagaaaagaaccaggtggtggttgggggtgatgaggtcctctacaggtttgaactcacatactataaccccacagccctcgtggttgatcttccagatgacctaccatcagaggagatcaggaagagggccagtgatatcatgaatcttaaattcgagcgtaccggtgaggaactgaccctggatgccatagcgctcaggaacaaatcaggaagccctgaaaaatttgcagaggcagcagggaccctggctgaacttaacttccctgttgttctatgcacattcgatccagaggcaatgagggctgccctcgaggtcctgggggatcagaggcccctcatgtatgcggctacaaaggacaacctccaggagatggctgatctttccatttcatacggctgccccctggtgctcttctcaccgggggaccttgaggagatgaagaacctcacaagaagactgcgggcaatgggccttactgaaattatcctggaccccggaacattcacaggtgagggaataggcgacaccatagacaactttgtcatgataaggcgccttgcagttgaggaaagggatgaggacttccgcttccccatcatgggcataccagcactctcaaggctttcaggaggggatccagttgaggataacataaaggaggccactgttgcagccacactcatgaaccgctacgccgacattcttatactcggaggaacagatatctgggaacttatgcccatactcaccctcagacagggcctctacactgatccaaggaagccacagactgttgatccgggaatatatgagtttggagacgttgatgagaactcccctgtgatactcacaaccaacttctcactcacatactacacagtggagggtgacctcaaggcaggtgatgttacggcatatctccttgtgcttgacacagagggaagggctgtggacgtttcactggctggaggacagctcacgggaaccgcagtggctgaccttataaaggatagtggtatagaggatagggtaaaggatagggttctcatcattcctggacttgcggcacctgctagtggtgaaatagaagatgatactggatggaaggtgcttgtggggccaagggattcctcagggatacctgactaccttgaaaaactggcatcggagtagtgaagtaagtaggaagcagggagcaggggaaagaaaattgacaactgtacaagattaatcgcgtctctgagcaatgaccaaatacatctacctccacggttttcttccagccccctatctgcgaaagcacaagatattagcaagcgtttcgcccaaattcacatacagctaacaatccctgatctcaatgctggtgaattttctcagttaacaatcacgcgccaaattcaacaagttgccgcaattttccctgataattctgaaccaataacgctgataggttctagtttaggcggtttaactgctgcttatctaggacagcgatatttacaagtacaacgcttagttttattagcgccagtttggttttttatcccattggttgcccaaaatgggtgaagaagctgtcacaagttggcaacaaacgatataggttctctcttctgccgtta

SEQ ID NO: 172 - DNA, 2771 bp, Artificial Sequence
  Synthetic Construct- SEQ ID NO: 172, example 172: a designer hox-promoter-controlled Corrinoid iron-sulfur protein DNA construct (2771 bp)
agaaaatctggcaccacaccgcagaaatataggggctaggagttgagggtactctggttcgtcaagcatttgggatgatttcccctcacaagttcctcaaattattctcctataaacaatagatataaggtcaaaacttgagttatgagtgctgagtaaaaaattactctccacgcctcagaggtagatatgatggccgtccagattttacgtgatcgtagccgagctgccgtccagaaagttgtcctgggcgccaccaaagaccaggggggtacccgcagccataccatcgtcgtcggtggcgatgctgccctgcctttccaccatttcgaaggagagattgtcaacaggccggtaatcggtatggaagtgcaggatatcgtacccgactggcccgacgttctcaaagatcccttcaccgatgttattaatgaaccagggcgctgggcccaaaagtgcgtagccgagtatggtgctgaccttatctacctgaaacttgacggggccgaccccgaaggcgccaaccattctgtggaccagtgcgtagctactgttaaagaggtcctgcaggccgtgggggtacccctggtagtggtaggttgcggcgatgtggaaaaggaccatgaggtcctggaagcagtagccgaggctgctgccggcgagaatctcctcctgggtaacgctgaacaggaaaactataaatccctaacggcagcctgcatggtccacaagcataatatcatcgcccgttcgcccctggatattaacatttgtaaacaactcaacatcctgatcaatgaaatgaacctgcccctggatcatatcgtcatcgacccgtccatcggcggcctgggttatggtattgaatactccttctcgattatggaacgcatccgtctgggggccctgcagggagataagatgctctccatgccggtcatctgcaccgtaggctatgaggcctggcgcgccaaggaagcctcggcaccggtgagcgaatacccgggctggggtaaggaaaccgagcgtggcatcctctgggaagccgttaccgccactgccctgctccaggccggcgcccacatcctcctcatgcgccatccggaagccgtagccagggtgaaggagaatatcgaccagttaatggtgagcaacgcctattaaatggataaattaacggaacttctgaaattacttcagaacacggaatccatcgaaataaatgagttcaggattgatgttgacgaacttgaactctacctgatgcctgtggttcagcaggccatccagaaaacagttgaggttagggaggcagttgaggcactccctgaggaggaatttgaaccaccggtaaagacataccctggtgaggttgcccaggtgaaactgggtgagggtacaaggaaacctgtttaccttggcggtcagaaggccctctacagatttgaggaaccccagccaaacccaccggtggttacattcgacgtctttgacatacccatgccgggtctcccaaggccgataagggagcacttcagcgacgtcatggaggaccctggcgactgggccaggaaggcggtaaaggagtatggtgccaacatggtcacaatacacctcatcggaacaggacccaaggtaatggacaagtcaccgagggaggctgcaaatgacattgaggaggtcctccaggccgttgatgtccccctggtaatcgggggctcaggggaccctgaaaaggatccactggttcttgaaaaggctgccgaggccgccgagggcgaaaggtgtctcctggcatcagcaaacctggaccttgactacagaaaggttgcaagggcagcccttgaccacaaccacgcggtcctatcatgggccataacagacgtcaacatgcagaaaaccctcaaccgttacctcatgaaggagggccttagtagagaggacatagtgatggacccaacaacctgtgcactgggttacggtatagaattttcaatagacgtcatcacaaggacaaggctcgcggccctcaagggtgatgcagaccttcagatgccaatgtcctctggaacaaccaacgcgtggggttcaagggaggcctggatgaagaaggatgaatggggacccacagactacaggggccctctatgggagatagtaaccggacttacaatgatgctctcaggtgtggatatattcatgatgctccacccaacatctgtgaggcttctgcgggagataggggaaaccttcacaagggaatacatgacgaccgaaacacctgatctccgggaatggataactgaacttgaatattgatgaagtaagtaggaagcagggagcaggggaaagaaaattgacaactgtacaagattaatcgcgtctctgagcaatgaccaaatacatctacctccacggttttcttccagccccctatctgcgaaagcacaagatattagcaagcgtttcgcccaaattcacatacagctaacaatccctgatctcaatgctggtgaattttctcagttaacaatcacgcgccaaattcaacaagttgccgcaattttccctgataattctgaaccaataacgctgataggttctagtttaggcggtttaactgctgcttatctaggacagcgatatttacaagtacaacgcttagttttattagcgccagtttggttttttatcccattggttgcccaaaatgggtgaagaagctgtcacaagttggcaacaaacgatataggttctctcttctgccgtta

SEQ ID NO: 173 - DNA, 7061 bp, Artificial Sequence
  Synthetic Construct- SEQ ID NO: 173, example 173: a designer hox-promoter-controlled CO dehydrogenase /acetyl-CoA synthase DNA construct (7061 bp)
agaaaatctggcaccacaccgcagaaatataggggctaggagttgagggtactctggttcgtcaagcatttgggatgatttcccctcacaagttcctcaaattattctcctataaacaatagatataaggtcaaaacttgagttatgagtgctgagtaaaaaattactctccacgcctcagaggtagatatgtcacataatgggatccatggtcaaggccgggtgtcccttttcctccaagtagggcaagatttcatccacggtggtaccgatggtctcatcagctattttatcgataaagtcctctcccaggccctcctcaacactacgacgtacaaagtcgtcgtggaggaaatccttcagagatttgggcatccagacgatccgggcgataccaccatcggcggaaataaactttttgctgacgatataggtgcggccgatgcccataaagcccggggtctgggtgccaccgccgatcatcccggccagggtagagaaggtcatccccgaaggagtcatgccggcgtgatccctggtggtaatcatgatgccgttgcactccggcaggatggccataatggcctcaaagcaaccgcaggaggtcatgggattctccataagggtgtacaggcagacctgttccaggttacggttggaagctgtatagagatagtcatttacactcttccagatacccttaatgggatcaatttccccttctttagggatgggctggttaggaccggcatggttgatttcataggacgccttggcgtccagccagcttacggctccacacaggcccacccgttccggggtgacaatacacacatggttgggggcaaaggactggcagaggacgcaggagtaaaaggtatccactgtttcatcggtaaggccgcgcatgcggtcgtcacgttccttgtatttctcccgggcgacctccatatattctttgaccttggcttcatcggtaaaaatggttacctggacccggtccacaatggcggggaattcttctttcattttggctaccaggatttcaccgtagttcttgaaacggaaacccttggctacggcatctttgctgacccgcaaccagttgatgttacgctggccggtgtgccagagaccttcaccgtagttgatgaagtcgtggatgcgccgttcgaggactccttcaaaatcggcctgcattttacggccatagatgtccaccagaatgcccaggggcagtttgctcccttccggtatctggtcaatatcaggacctatgacttcaatcttaccatcagtgatctcggattccgaaacggtgcgtaccagctcaaaggccggcgtccggttgccgcccatttctacgtacatatcgcccttacggatactctcgccctcaaaggcagggccaaagttaatgggcagatccaacttgatcttggtgagcttgatcccacgggtctccatggctatctggactattttatcatagtcctcaacgctgaagaaccaatccgggatctgtttgtcctccggtaggggctggtcggtgattaccggaaagccggtaaagatggccccgaaggcggcagccgtcttgaccatgtcatgctcgccgagataaaggacaaaggcgcggatacggcggcgctggtaatcgcgctgttcttcacgggcacccggggtaacgccaccgaacatcataccagcccgcagggcatagttggcggcatgaacaatctgggtgaagttccccaggggataggcgatatagtcaatccccagtttgacgttttcttccagcagctgttctaccgcttcatcacagatgaagagcataaagcccatacccatgagttccttgacgattttggccagggccttcgagtctttggctcgacccaggataatagcttcacccggaatggtccagtcgaccatcttgataccgaaacggcggacaaccgggtcgccgatgaaacccgtccagggtgggggcaggaggggttcatcaggcttatatttaaggtaacgcagggcttcaatgatctcggccgcataccaggtggcttccccggccaggcgggcattctcgaaattcaggacagggcttacctgcgctcgcttgcggtttaaaataggtggtaaatcccccagttttttgacctcttccccgctgaaacagcgaataaccggcaggtaataggctgtatcaggataaccgacgggatggtcgggaccataggtccggatggcctggtttaaaaggatttccgcgtaactggtagctgtaatggcgccgtggtaaacctcccggaacagggctaccggctctttaccttctggaatagcaccctcgaagattttatcaaaatcagtcatgtggcacccgaatcaaaaaaagccaagaaccttaaaggggatttctgggaccttaaaaatatccagatatccataggagaaattataactgaggaaaaacctcaggaggaagaggctaggggtccaaaaccccgcccccatgttaccgacctcaggtcatgggacatgaagctccttgaaagatacgaaccattctatgcacctttctgtgacatgtgctgcctctgcacctacggtaaatgcgacctcctcggtaagaagggagcatgtggtatagacgcagccacccagcaggcacgcatagtacttctcgcatgtctcatagggaccgccgcccatgcgggacacgcaaggcaccttgtggaccacctcatagagaaactgggagaggactatgaaatagacttgggcatgaatgtggatatagaggcacccataacaaggaccgttatgggaaggaggccgcggaccctgggcgacctcatggaggttatggactacgccgaggaacagatgtcacacctcctctcggcatgccacacgggacaggagggcgacagcagggactttgaatcgaaggcattccatgctggactcatggatgacctcacgagggaggttgcggatatcgcccagatagttgccctggatctccctaagggtgatgaggacgcacccctcgttgaactgggattcggtacaatagacaacaccaaacccgtgatactctgcataggccacaacgtcctccctggagcggatatagtggactacgtcaccgagagggaactcgaagacgaagttgaggtatgcggcatatgctgtgcagcaatagatgttacaaggtacagcgaggctgccaaggtcgtcgggcccctctcaaagcagctcagattcataagaagtggcgtggccgatgtgatagtggtggacgagcagtgcgtgaggacagacgtgctggaggaggccctcaaaaacaggtcagcggtgattgcaacaaccgataagatgtgcctgggactacctgatgtgacagatgaggaccccgacaaaatcgtgaatgacctcataaacggtaacatagagggggcactaatccttgacccccataaggttggtgaggtggcagttaaaactgcaataaaactggcaccaatcaggaaatccctcaaaaaattgccagaggttgatgagataatccggatggcatcagagtgcacagattgcggctggtgccagagggtctgccccaacagcctccctgtcatggatgcagttaagagcgcggccgagggtgatctgagcaaacttgaggagatggcacttgaggagctctgctacacctgtggacgctgcgaacaggagtgtgaaagggacatacctatagtatccatggtgacaaaggcaggtgaaaggcgcgtaaaggacgaaaaatacaagataagggctggccgtggccctgcccaggatgtggagataaggagggtcggcgcacccatacccctcggggacatacccggtgtcatagcctttgtgggttgctcaaactaccctgagggtggaaaggatgttgccctcatggcaaaggagttccttgagagaaactacatcgtggtcacaacgggatgcggtgcaatgtccatcggggaatacagggacgaggatggaaagacactctatgaaaaatacggtggacagttcgatgcaaagggacttgttaacatgggctcctgcgtatcaaacgcccatatatcaggtgccgccataaagatagccaacatattcgcacagaaaccactcgaggggaactttgaggagatagcggattacatacttaaccgtgtaggggcatgtggtgtcgcatggggtgcctactcccagaaggcggcggccatagcaaccggtgtgaaccggtggggaatacccgtcgtcctgggaccccacggatcgaagtaccgcagactgttccttggaagggcagatgacccagagaagtggaaactgaacgacctcagaacaggtgaggtcatcgatggggagccagctccagaacaccttctctatgcagcggagaaccgggaggaagcaacggtgatggtggccaaactctgcataaggccaacagacacacccaagggtcgccagatgaaactcagcaactacatagacctccacaaaaaatactttggcacaattccagatgacatcgacaggttcataaggacagagaaggacatccccatagtctacaagagggatatcctgaagatactggaggagaagaactggaagccaaggaagcttccaaaggaaccctcactccttgagaggtgaatgtttgaagacatacccgttgatgtaagtcccatgcacgagggggagcggataagatcagcaaacatgttcgttgaacttgccgggcccaaatccatcggagccgaactggtccaggttaaggatagcgttgaggatggaaaggtggaggtcatagggcccgagataagtgagatggaacagggccagatctatccattcgccataaacgtggagatagcaggaagcgaactcgaggaggaacttgaaagcgttatagagcggagactccatgaactctgcaactacgtccagggtttcatgcacctcaaccagagggaccagatatggtgccgtgtaagcacagaggcaagggacgcaggattcatgcttgaacaccttggaaaggcactatcagtcctcttcagggaggagttcccaataatcgaatcaatatcagtgacaatcatgaccgatgaggacgctgttaaagaattccttgaaacagccagggaaaagtatgagataagggattcaagggcaagggaactctcagacgaggacgttgacgtattctacgggtgcctcatgtgccagtcattcgccccaacacatgtatgcatcgtcacaccagaccggacagccctatgtggtgccataaactggttcgactgccgcgcagcctataagatggaccccgacggtccaatattcgaaattcaaaagggagatgtaattgacccggagaagggagaatatgagaatgttaacgctgcggtggcagagaactcacagggtacaacagagagggtttacctccacagcgtgttcgggtatccacacacatcatgtggctgcttcgaggcagtggcattctacataccagaactggatggcataggcatcgtgaacagggacttcaggggcgaaacaccccttggaataccattctctgcaatggcagggcagtgctcaggcggaaaacaggttgaagggttttcaggtctcagccttgagtacatgaggtcacccaagttcctgcaggcagatggtgggtactcaaggataatctggatgccaaaggatctgaaggaatctgtcattgacttcatccctgaagacctgagggataagatagccacagaggtggatgcaacatcaataaaggaactcagaaggttccttagggagaaggagcaccctgtccttgaaagggcaccagcagaagttgaggaagctgaagtcgttgaggaagaggaaacccatgctgaggaggcccccgtcactgagggaatacctgtaatggcgtccccagagatcagccttccagcagctggcggattcaggataattctcaagaacgcaaagatctacgctgagaaggtaataataaagcgtaaataactactgctccagggcatctatgagttcatcgagccatctgagccattctgtgtacttcatgctggggtatgagatgtctgcatttggatgcatgtacctgcagagggtcactgttttaaggtgtggtgcaaaggccttgagggttgaaaggccctgtgaacctatgtaatatgggacacctatgaagcatacaaggtcatagttgccatttccatcgaagccctcccagtcaggatttttgaggttgtttacaagttcgattacccctattatgttttttctttccagtttagttaacctgagacctgatcctccggttagggcaacctccattttccctttttttattattttaactatcctatccactatatcttgtggaaggtcatttaacagcgaccctaccaccatgagtggtctttcagacttttttatggccgatgcaaccatttcagggggcatgacggttgcattccttattgatgttagagctgggttccatgcggtcattgaagtaagtaggaagcagggagcaggggaaagaaaattgacaactgtacaagattaatcgcgtctctgagcaatgaccaaatacatctacctccacggttttcttccagccccctatctgcgaaagcacaagatattagcaagcgtttcgcccaaattcacatacagctaacaatccctgatctcaatgctggtgaattttctcagttaacaatcacgcgccaaattcaacaagttgccgcaattttccctgataattctgaaccaataacgctgataggttctagtttaggcggtttaactgctgcttatctaggacagcgatatttacaagtacaacgcttagttttattagcgccagtttggttttttatcccattggttgcccaaaatgggtgaagaagctgtcacaagttggcaacaaacgatataggttctctcttctgccgtta

SEQ ID NO: 174 - DNA, 1847 bp, Artificial Sequence
  Synthetic Construct- SEQ ID NO: 174, example 174 of a designer hox-promoter-controlled Thiolase (07) DNA construct (1847 bp)
agaaaatctggcaccacaccgcagaaatataggggctaggagttgagggtactctggttcgtcaagcatttgggatgatttcccctcacaagttcctcaaattattctcctataaacaatagatataaggtcaaaacttgagttatgagtgctgagtaaaaaattactctccacgcctcagaggtagatatgatgggcaaagaaagtagttttagctgtgcatgtcgtacagccatcggaacaatgggtggatctcttagcacaattcctgcagtagatttaggtgctatcgttatcaaagaggctcttaaccgcgcaggtgttaaacctgaagatgttgatcacgtatacatgggatgcgttattcaggcaggacagggacagaacgttgctcgtcaggcttctatcaaggctggtcttcctgtagaagtacctgcagttacaactaacgttgtatgtggttcaggtcttaactgtgttaaccaggcagctcagatgatcatggctggagatgctgatatcgttgttgccggtggtatggaaaacatgtcacttgcaccatttgcacttcctaatggccgttacggatatcgtatgatgtggccaagccagagccagggtggtcttgtagacactatggttaaggatgctctttgggatgctttcaatgattatcatatgatccagacagcagacaacatctgcacagagtggggtcttacacgtgaagagctcgatgagtttgcagctaagagccagaacaaggcttgtgcagcaatcgaagctggcgcattcaaggatgagatcgttcctgtagagatcaagaagaagaaagagacagttatcttcgatacagatgaaggcccaagacagggtgttacacctgaatctctttcaaagcttcgtcctatcaacaaggatggattcgttacagctggtaacgcttcaggtatcaacgacggtgctgcagcactcgtagttatgtctgaagagaaggctaaggagctcggcgttaagcctatggctacattcgtagctggagcacttgctggtgttcgtcctgaagttatgggtatcggtcctgtagcagctactcagaaggctatgaagaaggctggtatcgagaacgtatctgagttcgatatcatcgaggctaacgaagcattcgcagctcagtctgtagcagttggtaaggatcttggaatcgacgtccacaagcagctcaatcctaacggtggtgctatcgctcttggacacccagttggagcttcaggtgctcgtatccttgttacacttcttcacgagatgcagaagaaagacgctaagaagggtcttgctacactttgcatcggtggcggtatgggatgcgctactatcgttgagaagtacgaataatgaagtaagtaggaagcagggagcaggggaaagaaaattgacaactgtacaagattaatcgcgtctctgagcaatgaccaaatacatctacctccacggttttcttccagccccctatctgcgaaagcacaagatattagcaagcgtttcgcccaaattcacatacagctaacaatccctgatctcaatgctggtgaattttctcagttaacaatcacgcgccaaattcaacaagttgccgcaattttccctgataattctgaaccaataacgctgataggttctagtttaggcggtttaactgctgcttatctaggacagcgatatttacaagtacaacgcttagttttattagcgccagtttggttttttatcccattggttgcccaaaatgggtgaagaagctgtcacaagttggcaacaaacgatataggttctctcttctgccgtta

SEQ ID NO: 175 - DNA, 1514 bp, Artificial Sequence
  Synthetic Construct- SEQ ID NO: 175, example 175: a designer hox-promoter-controlled 3-Hydroxybutyryl-CoA dehydrogenase DNA construct (1514 bp)
agaaaatctggcaccacaccgcagaaatataggggctaggagttgagggtactctggttcgtcaagcatttgggatgatttcccctcacaagttcctcaaattattctcctataaacaatagatataaggtcaaaacttgagttatgagtgctgagtaaaaaattactctccacgcctcagaggtagatatgatgcaaaagatttgtgtaataggtgctggaacaatgggctcaggcatcgctcaagtatttgcacaaaatggctttgaagtaattttacgcgatattgatatgaagttcgtagaaaaaggatttggcacaattgaaaaaatttacaaagaaatgttgacaaagggaaaattacagcagatgagaaaacgaattttaagcagaatcagaggtacaacaaatttggaagacgcaaaagaagcagattttgtagttgaagcggctatagaaaatatggatctcaagaaacaaatattcaaagagctagatgaaatatgcaaaatggaaacaatccttgcgtcaaatacatcatcactatccataacagaaatagcaagtgcgacaaaaagacctgagaaagtcataggaatgcatttcttcaacccagttccagtaatgaaacttgttgaagtcataaaaggattaaagacatcagagcaaacatttaatgtcgtcagagaattggctttaaaagtagacaaaacacctatagaggtcaaagaagcacctggatttgttgtaaataggattttaatcccaatgattaatgaagcaattggaatacttgcagtggtgttggcaactgacaagagcatagatgaagctatgaaacttggtgcaaatcatccaataggacctttggcattgtctagtttgataggcaatgacgtcgttcttgctataatgaatgtgctttatgaagagtacggcgattcgaaatacagaccacatccacttctaaaaaaagtggtaagaggcggattgctgggtagaaaaactggcaaaggtttctttgaatacaaaattaatcttttaaggaggagaatatcatgatgaagtaagtaggaagcagggagcaggggaaagaaaattgacaactgtacaagattaatcgcgtctctgagcaatgaccaaatacatctacctccacggttttcttccagccccctatctgcgaaagcacaagatattagcaagcgtttcgcccaaattcacatacagctaacaatccctgatctcaatgctggtgaattttctcagttaacaatcacgcgccaaattcaacaagttgccgcaattttccctgataattctgaaccaataacgctgataggttctagtttaggcggtttaactgctgcttatctaggacagcgatatttacaagtacaacgcttagttttattagcgccagtttggttttttatcccattggttgcccaaaatgggtgaagaagctgtcacaagttggcaacaaacgatataggttctctcttctgccgtta

SEQ ID NO: 176 - DNA, 1430 bp, Artificial Sequence
  Synthetic Construct- SEQ ID NO: 176, example 176: a designer hox-promoter-controlled Crotonase DNA construct (1430 bp)
agaaaatctggcaccacaccgcagaaatataggggctaggagttgagggtactctggttcgtcaagcatttgggatgatttcccctcacaagttcctcaaattattctcctataaacaatagatataaggtcaaaacttgagttatgagtgctgagtaaaaaattactctccacgcctcagaggtagatatgatggaattaaaaaatgttattcttgaaaaagaagggcatttagctattgttacaatcaatagaccaaaggcattaaatgcattgaattcagaaacactaaaagatttaaatgttgttttagatgatttagaagcagacaacaatgtgtatgcagttatagttactggtgctggtgagaaatcttttgttgctggagcagatatttcagaaatgaaagatcttaatgaagaacaaggtaaagaatttggtattttaggaaataatgtcttcagaagattagaaaaattggataagccagttatcgcagctatatcaggatttgctcttggtggtggatgtgaacttgctatgtcatgtgacataagaatagcttcagttaaagctaaatttggtcaaccagaagcaggacttggaataactccaggatttggtggaactcaaagattagcaagaatagttggaccaggaaaagctaaagaattaatttatacttgtgaccttataaatgcagaagaagcttatagaataggcttagttaataaagtagttgaattagaaaaattgatggaagaagcaaaagcaatggctaacaagattgcagctaatgctccaaaagcagttgcatattgtaaagatgctatagacagaggaatgcaagttgatatagatgcagctatattaatagaagcagaagactttgggaagtgctttgcaacagaagatcaaacagaaggaatgactgcgttcttagaaagaagagcagaaaagaattttcaaaataaataatgaagtaagtaggaagcagggagcaggggaaagaaaattgacaactgtacaagattaatcgcgtctctgagcaatgaccaaatacatctacctccacggttttcttccagccccctatctgcgaaagcacaagatattagcaagcgtttcgcccaaattcacatacagctaacaatccctgatctcaatgctggtgaattttctcagttaacaatcacgcgccaaattcaacaagttgccgcaattttccctgataattctgaaccaataacgctgataggttctagtttaggcggtttaactgctgcttatctaggacagcgatatttacaagtacaacgcttagttttattagcgccagtttggttttttatcccattggttgcccaaaatgggtgaagaagctgtcacaagttggcaacaaacgatataggttctctcttctgccgtta

SEQ ID NO: 177 - DNA, 1784 bp, Artificial Sequence
  Synthetic Construct- SEQ ID NO: 177, example 177: designer hox-promoter-controlled Butyryl-CoA dehydrogenase DNA construct (1784 bp)
agaaaatctggcaccacaccgcagaaatataggggctaggagttgagggtactctggttcgtcaagcatttgggatgatttcccctcacaagttcctcaaattattctcctataaacaatagatataaggtcaaaacttgagttatgagtgctgagtaaaaaattactctccacgcctcagaggtagatatgatgaatttccaattaactagagaacaacaattagtacaacaaatggttagagaattcgcagtaaatgaagttaagccaatagctgctgaaatcgacgaaacagaaagattccctatggaaaacgttgaaaaaatggctaagcttaaaatgatgggtatcccattttctaaagaatttggtggagcaggcggagatgttctttcatatataatagctgtggaagaattatcaaaagtttgtggtactacaggagttattctttcagcgcatacatcattatgtgcatcagtaattaatgaaaatggaactaacgaacaaagagcaaaatatttacctgatctttgcagcggtaaaaagatcggtgctttcggattaactgaaccaggtgctggtacagatgctgcaggacaacaaacaactgctgtattagaaggggatcattatgtattaaatggttcaaaaatcttcataacaaatggtggagttgctgaaactttcataatatttgctatgacagataagagtcaaggaacaaaaggaatttctgcattcatagtagaaaagtcattcccaggattctcaataggaaaattagaaaataagatggggatcagagcatcttcaactactgagttagttatggaaaactgcatagtaccaaaagaaaacctacttagcaaagaaggtaagggatttggtatagcaatgaaaactcttgatggaggaagaattggtatagctgctcaagctttaggtattgcagaaggagcttttgaagaagctgttaactatatgaaagaaagaaaacaatttggtaaaccattatcagcattccaaggattacaatggtatatagctgaaatggatgttaaaatccaagctgctaaatacttagtatacctagctgcaacaaagaagcaagctggtgagccttactcagtagatgctgcaagagctaaattatttgctgcagatgttgcaatggaagttacaactaaagcagttcaaatctttggtggatatggttacactaaagaatacccagtagaaagaatgatgagagatgctaaaatatgcgaaatctacgaaggaacttcagaagttcaaaagatggttatcgcaggaagcattttaagatagtgaagtaagtaggaagcagggagcaggggaaagaaaattgacaactgtacaagattaatcgcgtctctgagcaatgaccaaatacatctacctccacggttttcttccagccccctatctgcgaaagcacaagatattagcaagcgtttcgcccaaattcacatacagctaacaatccctgatctcaatgctggtgaattttctcagttaacaatcacgcgccaaattcaacaagttgccgcaattttccctgataattctgaaccaataacgctgataggttctagtttaggcggtttaactgctgcttatctaggacagcgatatttacaagtacaacgcttagttttattagcgccagtttggttttttatcccattggttgcccaaaatgggtgaagaagctgtcacaagttggcaacaaacgatataggttctctcttctgccgtta

SEQ ID NO: 178 - DNA, 2051 bp, Artificial Sequence
  Synthetic Construct- SEQ ID NO: 178, example 178, a designer hox-promoter-controlled Butyraldehyde dehydrogenase DNA construct (2051 bp)
agaaaatctggcaccacaccgcagaaatataggggctaggagttgagggtactctggttcgtcaagcatttgggatgatttcccctcacaagttcctcaaattattctcctataaacaatagatataaggtcaaaacttgagttatgagtgctgagtaaaaaattactctccacgcctcagaggtagatatgatgattaaagacacgctagtttctataacaaaagatttaaaattaaaaacaaatgttgaaaatgccaatctaaagaactacaaggatgattcttcatgtttcggagttttcgaaaatgttgaaaatgctataagcaatgccgtacacgcacaaaagatattatcccttcattatacaaaagaacaaagagaaaaaatcataactgagataagaaaggccgcattagaaaataaagagattctagctacaatgattcttgaagaaacacatatgggaagatatgaagataaaatattaaagcatgaattagtagctaaatacactcctgggacagaagatttaactactactgcttggtcaggagataacgggcttacagttgtagaaatgtctccatatggcgttataggtgcaataactccttctacgaatccaactgaaactgtaatatgtaatagtataggcatgatagctgctggaaatactgtggtatttaacggacatccaggcgctaaaaaatgtgttgcttttgctgtcgaaatgataaataaagctattatttcatgtggtggtcctgagaatttagtaacaactataaaaaatccaactatggactctctagatgcaattattaagcacccttcaataaaactactttgcggaactggagggccaggaatggtaaaaaccctcttaaattctggtaagaaagctataggtgctggtgctggaaatccaccagttattgtagatgatactgctgatatagaaaaggctggtaagagtatcattgaaggctgttcttttgataataatttaccttgtattgcagaaaaagaagtatttgtttttgagaacgttgcagatgatttaatatctaacatgctaaaaaataatgctgtaattataaatgaagatcaagtatcaaagttaatagatttagtattacaaaaaaataatgaaactcaagaatactctataaataagaaatgggtcggaaaagatgcaaaattattcttagatgaaatagatgttgagtctccttcaagtgttaaatgcataatctgcgaagtaagtgcaaggcatccatttgttatgacagaactcatgatgccaatattaccaattgtaagagttaaagatatagatgaagctattgaatatgcaaaaatagcagaacaaaatagaaaacatagtgcctatatttattcaaaaaatatagacaacctaaataggtttgaaagagaaatcgatactactatctttgtaaagaatgctaaatcttttgccggtgttggttatgaagcagaaggctttacaactttcactattgctggatccactggtgaaggaataacttctgcaagaaattttacaagacaaagaagatgtgtactcgccggttaatgaagtaagtaggaagcagggagcaggggaaagaaaattgacaactgtacaagattaatcgcgtctctgagcaatgaccaaatacatctacctccacggttttcttccagccccctatctgcgaaagcacaagatattagcaagcgtttcgcccaaattcacatacagctaacaatccctgatctcaatgctggtgaattttctcagttaacaatcacgcgccaaattcaacaagttgccgcaattttccctgataattctgaaccaataacgctgataggttctagtttaggcggtttaactgctgcttatctaggacagcgatatttacaagtacaacgcttagttttattagcgccagtttggttttttatcccattggttgcccaaaatgggtgaagaagctgtcacaagttggcaacaaacgatataggttctctcttctgccgtta

SEQ ID NO: 179 - DNA, 1808 bp, Artificial Sequence
  Synthetic Construct- SEQ ID NO: 179, example 179: a designer hox-promoter-controlled NADH-dependent Butanol dehydrogenase DNA construct (1808 bp)
agaaaatctggcaccacaccgcagaaatataggggctaggagttgagggtactctggttcgtcaagcatttgggatgatttcccctcacaagttcctcaaattattctcctataaacaatagatataaggtcaaaacttgagttatgagtgctgagtaaaaaattactctccacgcctcagaggtagatatgttacagggaagcgcgcaaaatggcgagcacatcatcgcggttcaatgttttgaaacggccgaactcgccaaacgccatcgctttatcggccatcagctccaagttttcctcgccgatgccatagtccgcaagccgcgacggcgccccgaggctcgaccagaactcgcgcagccgctcgatgccttcaagcgccacatcccgctccgatttgcccgccggatcgacatcaaagacgcgcaccgcgagctgggcgaaacggctgacattttcatcgagcacatgcttcatccagttcgggaacaaaatcgccaatcccccggcgtgcgggatgtcatacacggcggaaacggcatgctcaatattgtgcgtcgcccagtcgccgcggacgcccatttgcaagaagccgtttaaggcgatcgtgcccgagtacatgatcgtctcgcgcagctcgtagttttccaaatcgttgatcagtttgggcgccgtttcgatcacggttttcaacaccgcttcacacatccggtcttgcaatggcgtgttcggcgtatggtggaaatattgctcaaacacatgcgacatcatatcgacaatgccgtaaaccgtatggtctttcggaacggtcatcgtatacgtcggatccaaaatcgaaaattgcgggaacgtaaacgggctgccccagccgtatttttctttcgtctcccagtttgtgatcaccgaaccagaattcatctccgacccggtcgccgccagcgtcaagacgacgccaaacggcagggcgccggtgacgggcgcttttttcgtgataaactcccacggatcgccatcgaatttcgccccggcggcgatcgctttcgtgcagtcgatgacgctgccgccgccaaccgccagcaaaaattcgacgccttcccgcttgcaaatgtccaccccttttcttacggtcgagacgcgcgggttcggttcgacgcctggcagttcgatgacctcggcgccaatattccccaatatcttcatgacttcctcatacaatccgtttcgtttgatgctgccgccgccatacacgagcagcactttcttgccgtagcgcggcacttcttctttgagacgttcgagctgcccttttccgaaaatcagtttcgtcgggttgcggaaaataaactcttgcattgaagtaagtaggaagcagggagcaggggaaagaaaattgacaactgtacaagattaatcgcgtctctgagcaatgaccaaatacatctacctccacggttttcttccagccccctatctgcgaaagcacaagatattagcaagcgtttcgcccaaattcacatacagctaacaatccctgatctcaatgctggtgaattttctcagttaacaatcacgcgccaaattcaacaagttgccgcaattttccctgataattctgaaccaataacgctgataggttctagtttaggcggtttaactgctgcttatctaggacagcgatatttacaagtacaacgcttagttttattagcgccagtttggttttttatcccattggttgcccaaaatgggtgaagaagctgtcacaagttggcaacaaacgatataggttctctcttctgccgtta

SEQ ID NO: 180 - DNA, 10538 bp, Artificial Sequence
  Synthetic Construct- SEQ ID NO: 180, example 180: a designer hox-promoter-controlled Energy converting heydrogenase (Ech) DNA construct (10538 bp)
agaaaatctggcaccacaccgcagaaatataggggctaggagttgagggtactctggttcgtcaagcatttgggatgatttcccctcacaagttcctcaaattattctcctataaacaatagatataaggtcaaaacttgagttatgagtgctgagtaaaaaattactctccacgcctcagaggtagatatgttattctaacattttcttaatatatggctcaagagggataatatctccagttgaacgaggtgttaaagctgaaactgttaaaacacgttcttcttgatccatactaacagtgatagtaccaggtgttaatgtgatagtatttgatagtattgcaagagatactggtctttcaagatcaggtttaatctttacaactataggatcaacatcgcccttgagacagcaaatacttgtgtcaagtattgctttaattatttcgactactaatactacgaaaaattctattccgtagattattctagttaaaaacatttataaatcgcccccacctaatacgtaggatacagctattgttcctacaggacttaatataagtattgcaaatgctatgtctctacagaaatctattccagtaagtgaagataccattgttaaaacaattgcaagtgcaattgtgaaacctgctaccccagctaaagctgaaccaattgttcttcttgctgcaatttttacatttgctagcatgtaaacaattagacataacatgaggaacaattcagatattgttaaaaaatccatttattgctccccctgttctccacggaagtgtccacttgctattgcatgagttgcaaatggtgctaatataaagtatgtcattcctaaagctggttctccaagaagtattaatattaacacgccaagcatatctacaatacctaacatttctaatcttccaaatacgacatatttaacatcgtcatcggtattacataatagtccttttgctgtaattaaaacgaatataccgcagattataaatattaaccctataattaatccaacaggatctacatttaaagtaagttctaatgctgcttcagtcatttaggaatcaccttcctcttttgatacaggttgttctcttgttttaagaattgtaagagctactaatgttggtacaatagctgctcccactacagcttgtgttaatgctacatcgggtgctaataaaacttgataaattgctgctaaaataaaaccagtaatactagttaatacagccattttaattaaatctttttgaattaaacaaacaaatgcacctaatattgcaaataaatataaaatccaaggtactgcattttgtattattaaatttatatctgccatctattcattattatcctctccaaatcttttatcatttaaaagaacggatgcacttaaagtaccatgtcttttatataatactactgtcattgctaacattacagcaagtgtacttgctccaattacaatactagtaagtactaatgcaaatggtaatggatatgatgcttgacctaagaagttatttacttccatattttgtaaaaagatatatgtaattccgttaactttgtaacctaatgaaattaataataaatttacaccatcacctataaatgcagccccaataattttcttaacaacattatctagataaactaatgctactgtacccataatcattaaaagtgctgctgtaattaaagctcctaattgtactgataacatttacattattaaagcggaaaaagccatgactccaagtctatttactactaaatcaggacataaacctataattaaacaaataattaagaagaataccattattgccatagttgttttaggaacttttgcagaagatacttctaaatcatctggttttggtctaaggaacattgcatatgtgatttttaagaatgctaagaaagttacaatacttaatataatcataattattgcaagttctggtattcctgcacttaatgcagcttgacataacatgtatttactttggaatacattgaatggaggtactccagccattataaatcctgcaagtacaattaataatgctgctacaggcatatgttctaataatccaccaagtttactgattttacttgttcttgttttgtataatactaaaccaaatcctacaaacaagaatgaagttactactaattcatttactgcttggaataatcctgctgttatactgtatggagttcctaatcctagtcctacaccaatataacctaattcaccaacagctaagtatgcgatgatacgtttgtaatcatcttgcaccatagccatacttatacctaaaatcattgcaagtacagatactgcaagtattgccatttgtactgatggtaaatatccaaatattctaattaatactaaacctatggatatacaacctattacagagaatgattgtaataatactgatccactaggtaaacctttactgtaaatttctgatttaattgcattgaatggtggtaatcctgttgcatataaccaaccataaattaacatacctgctgcaaataataatactgggtttgttggatctactgctccattgtgtatcatcattacaatatcagttatgtttacgttacctgttaatccaagtaataaagcaatacccaataacatgaaggaaccgcctatttctccaagtaacatgtattttaaaccagttacataatttcctcttactcttgatacgagtattaaacctacttgaacaagagctgctatttcaaagaatacatataagtggaatatatcatctgttaatacaaatgccattaatgctgctgagagcatgaataataaatataagtatactccagatgttttcttagtttctgcaatggatatgaatactgcacacattgcaactatacctaatataaatgcaactacttgttgtccaggtccaaatgcatatgtaattgctgggtggaataattctagaactgatccagaaattattgctttagataatgcaggtaattgaactgctaatccaccagctgctagaggtttatatcctccaaagaaatggtttccatatgttgctactaatggtactattggtaaacaaatagcagtaataactgccaatacttttgttattttttcagaaccatgtaataggttaactaatatagcacaaattattggtataataaccattaatggtaaaaagatagttccatccatctatattcccccccagtagaatactattgatattattgctaatgttaaaacagcataaaacatcatattatttatatcatcgttgtgttctttgtacaatttaggcatgattggtgttgcatacataaagattatgattaaggcaacttctacaattaccatcaatgcaggacttactaatctaatagtcaaagcagccactaataaagatgctattaagactaattcagcagacatgactgatgatgttacagatccattaactaatgttttcttaggatcatccccaaatgtactttttaaagtttcgacaagtttatcgtacatattcattcactcatcgtcgtcgcctccaaggtttacttttcctctaccaaatacgagcatagttgttactacagcactaactaagattaatgcttcacctaaagtatcgaatcctctgaaatcaaatactatgtttgttaccaagttaggtgctacagatactcctaatccttgatagatatagttgataccagggaatattaaggaactgaagttatacattgaacttaaaaatactgctgagaatgctagaaaagatacagctaatgctatttttctaatagaagatttcatctattctatttcctcatcatcaacgtagtcttctttgtatttagttacactatagaaaagaactactaatgttgttaatcctataaatacttttaatcctaccactatgtttaaatatggaattattccagcatgtaatgcatctgggaagttaaatatagcttctacaccagatggtactaatccatatatgtttgttcctaagttataaaggaatgaaccacctgtaaataatccacataaaccaaggaatacataacctaaagctccaaagctttctattatggacattctttcgtgtgaaaaattaaatggattttcttttaaaccatatgcaagaatacagagaatagctcctgaagccataatagctcctccctggaaacctcctccaggtgtaatgtgtccaccaagaatagtcatagcaccataacctattaatataaaggataatgggtatgatattaatttaagaagatcactcatttaagcctcacttttagttcctaataatcctcttccgactattgcaccaataatagcaactacaaatcctggtcctaatggtaaactttcatagtatgggaaagttccaaaccagtatgctatgatgattcctgcaattattatagcaatccatgaggaagtattgagttttataccttttgttggtgttttatgcataataactcctgctaggaaacctataataaaaccaactattgttggtccagtatataagactccaaaaaggttaggagccattgattgtaaaaacggtactgtactttctataaccattcatattgtagccccaaagtctctttgtatttttattgctctagcaggacatgctgtcttacaagctccacaataaatacatctgttgttatcaatttttaagttaccttcttcatcaggagcaattgctttgaaaacacatgcatctatacatactccacaacctacacataagttattgttgatcatggaatatccactttgtattttcattttaagtggtgatgttttaggtatagcatttactggacagtaaattccacatttttcacaaagaacacatttatcaaagttaagttttacttctttatcttcaatagttaatgcatcttttggacaaacttctacacaaataccacatttaatacattgtgccccaatttctccattccatgaagtatttccaaatttacgtgcaccatatttacattcaggaatacatcctccacaacctacacatataccttcaagtgtaatttttgaatctggaacaaattctaatacaccttgtggacaagctgttacacatggagcatgttcatagtctgctgcacaatgttcttcattattaacattattacataatgaacataaatctgcactgaatctaacttttttattgataatttgtaaaccatttgttggacatgcatctgcacatactttacaatcaatacatccaatcatttttgtatcgttttcaacatcatattctggttgttgaatttcaagttcaaagtctttttcaatgattgcatcgtttggacattcaattaaacatttgtaacataatgcacattttttcatgtcaacttgatatgctccaccttcttcaataggtccaattgcatttcttggacaaacatcaatacaagtatcacattttgtacaaactcctggttctatgtatgagaacttaattgagtttgttggacagaaatatgcacatcttccacattcaatacaatcatcatgatttgttcctacattgattctgttgaccatttctttttccatttgaactggtctttttggtggtgccattctagcattatttggacatgcaggtacacatacaccacaattagaacataatcccatgatttttccatctttaactgtgataacacttacaggacatacattcatacacattccacataagttacattttgttctgtctactacatatccaccaaatttgtttttaaagatagctttgtttggacagactttttcacacttaccacaggttatacaactaactgctttcccattaactactttaatagcatcagtagggcaagcatctacacaatttcctgagccattacaattacctgttgtcataaacatctaattctcatttccagctgcttcttgagctgctactttttcttttaattctctatttttctgaataattgaatcatcagttaaatattgagctatgtattggattttcttctcagatacttcacttggatctaataacatactgtttacatccttatcacatttgtttccaatgtcattaggatgaattgttgctgctactccaaataatgcatatactggacagaaatcgtgacattgataacaatgtacacagttaatttcatcaatctcaggaattgctgttttaactatgccatcagctatttctacaggttctactggaaccataataatagcttttgtaggacatacattagaacatcctccacaaccaatacattctacttctgcaactttaggtgatggtttcacattaccatttaatacatcttcacgtaattgtaaatctgttctacattcactaccaaaaattattcttttaaggttgttgtagattccgttgataaaaacttttcctaaactcatttatttatcttcttttccaagtagtattggtattactgatactactccagctacaacatcttctggccttactgcacatccaggtattttagcatctactggtataacattatctacaggtccttcaatttcttcagaaggaatttctccatgaatatttttgtatactccaccagttaaagcacatgctcctactgcaacaactaatttaggtttaggtattgcttcgtaaattttaagaagtggctctttagtccagtaagttacaggaccagatactactaaaacatcagcttcccttggattccatgttaaatacacattgtattgttctatatcgaatttaggagacaatactgtgttaactatttctatatcgcaaccgttacatccaccagtataaactaacataaggtgtattgcctttttacgggcttgtgattttaatcccatctataatttaattatttgtatagctctatcagtacaagtgaaacatggatcacatgatacaatagcaagttgtgcatcctgaattgggtgtccaatacaagattcttgcattgcaccaatgttagacattgatggagttcttataatactatgtcttacttttccatcctctaaaccatatgaatgataacatactccacgaggtacttctatataacttttataaactggtgagtctactaaatcccaatctcttgttacaataggacctttaggtaagtttttaataacttgtctaatgatctttgttgattcaaagatttcagttgctctcataagaatattagcccttacatctccaccatcttgagtgataatatcaaattcaaaaggttcatattcaaacatttcagttctaaaatcatattcatatcctgttgctcttaaagatgggccagttacatgtaaatcaagtgcttgtttctgtgataattcaccagtaccagtaatacggtgcattaccattggatcagctatgaatctttcagcaaaatctgctactttttcatcgatataatccattgtgtcaagtactctttgttgttctttaagatttaagtcagctctaggtcttactccaccaagaactgatattccatattgaactctgtttccacccatcatatataaaagatccattacagattctcttatataaaatattctcatagcaaaggtttcatgacataatacctcagatccatgacctaagtataacatatgactatgtaatctttctaattcttctgcaagaacacgtaaatatactgctctttctggaatttctatacctaaagctccttctcctacacgacaggaattgtatatatgtccgttagaacaaataccacatactttttctgttaaagcatttgctttttctacaggtagtccttccataattctttcaattcctctatggtttaaacctacagtaatttcagcatcttttactatttcatcttctacaaatagtctaactctgtaaggttctaaagctgccggatgtactgtacccatattgatttctgtttcaaaaacttgtctttctgttttgtcacaagttgttgctccatctatttttgtaaccatttataatacagcaattaaaactgctactacagcaacagcacttgttgctataactgtagggaaaaactcacggttagtgaataatggtgagaatgcacttactacagctgcagctattgttattattatagaacatattattggtacaattattgagataccaaatactggtggcatacctaagaataatgttgaatatacacaagctccaacaaatattaagaatgcatgtgccattacatatactgctctgtattttgacatgtattcaagtaaaggaccttgaattacatctgaatgaccttccatgaatgcaaatggattagagttaagtacaattaagaatcctacaaagaacacaattgttcctatgatacctggaagtgtgaataatattggacctgtaattaattgatatcttacaatgtctattaaattcaaacttttagccattattgcaggaataaataaagctatataaaatggtaaactaccataagatatgagttttaatgatctttttgcacttaattgttctataaatgattgttttgcaccaatatgttttccaccttttgcttgatcagggaaaggcatggtttttgataaaagtgattgtgagaatgaactcataaataagtataaaacttcttccacttttaataaaccaactaatgctactaaactagcaaaagatccccaagctaccattacttgtggtatgagtatgaggaatattgctgctactataatcaaagttattaaaggtaatatattatatactctaggcaatattgcagatggttctaatacttgtttaaagaagaattttaatgttgcatagaaaccaggacttgaaagttgaggaccaagtctttgttgtactcttgcctctgctttcttttcaatacccggtaaccataaacatacaatacttgcaattataaaagcacctataacatagcctattgatgttactatatccatttaattactttctatagcttttctttcttcatctaatttatgtttagccatttgatacattactaaaaagtcatcatcatcattaactggaattacttccaatcctaatgcttcatgttcttcaatccattcatcattaagaacaggaacttctagtttaattggttcatcttcatgattaactacaattaaatttctgaaagatgttcttacttctacaatataacctgctaaacctattatatgatgtggtcttaatactattttcatctagagtacttcatcaactctatcaatatcaaatttagcagtttttgctattgacattacagccataacacctgcttgaactggatctgttacaactaaatcagcatggtctcttacagaaccaaccatattaagacttattactttaactccatatttattttttatttcatcaatagcatccacaatagatccacccattaatgatccagcaagtactaaacaacccactctaggtaaacatccaacggcacgtacagcttcagttaattttttttctccagccagtggtaatgtatcaacacttatacgttcaccacgaatattatgacgatctgcttcggtaattgcacctaatgctacttgagatacttgtgctccaccaccaactatgatgattcttttaccccatactttatccatagaaggagatagttttacttctttgacttctggaaattccattatttcagaaagtacttcttcaatattatccacatgatctaattctatatatgtagaagcatgatcatcagattccatatataaatgggtatagacaatattaattccattttttgcaagataatcagttacttttcttaaaactcctggtttatctattgtcctcatatttattgcatctatcattgaagtaagtaggaagcagggagcaggggaaagaaaattgacaactgtacaagattaatcgcgtctctgagcaatgaccaaatacatctacctccacggttttcttccagccccctatctgcgaaagcacaagatattagcaagcgtttcgcccaaattcacatacagctaacaatccctgatctcaatgctggtgaattttctcagttaacaatcacgcgccaaattcaacaagttgccgcaattttccctgataattctgaaccaataacgctgataggttctagtttaggcggtttaactgctgcttatctaggacagcgatatttacaagtacaacgcttagttttattagcgccagtttggttttttatcccattggttgcccaaaatgggtgaagaagctgtcacaagttggcaacaaacgatataggttctctcttctgccgtta

SEQ ID NO: 181 - DNA, 3416 bp, Artificial Sequence
  Synthetic Construct- SEQ ID NO: 181, example 181: a designer hox-promoter-controlled [NiFe]-hydrogenase MvhADG DNA construct (3416 bp)
agaaaatctggcaccacaccgcagaaatataggggctaggagttgagggtactctggttcgtcaagcatttgggatgatttcccctcacaagttcctcaaattattctcctataaacaatagatataaggtcaaaacttgagttatgagtgctgagtaaaaaattactctccacgcctcagaggtagatatgttagatcctttttacaaggtcgccttcactgtcgtatacttccaaggtggcaagtctcatctgactgtcaatggtgtgtgttgcgcaggagagacatgggtcgtatgcccttatgaccatctccatgaggttgaatatcttatcatccacttcaacaccaggtttgatgtagtcctgggcaaccttctggatacccatctccatggcagggttgttctggattgttgcaaccacgatgtttgccttggttatgaggccgttctcatcacaggtgtagtggtgtgtgagtgttccccttggtgcctcaactatacccacaccgtcgcctgcctgcctttcaagtgaatcagggaatttttctccggataggtctccttcaagtgcatcggctgcacattcggcacatgcgaggacttctatgagccttgcccagtggtacaggagtgtctgctgtgcgtatccaaatttgtcctggaactccttgaagtaatcctgtgcctttggagctgcatcaggcatcttatctgcgacgttgagccttgagagtggtgagacacggtagacaccatcagggtatccaaggtcctttatgtatgggaatttgagccaggagtatggtttaacatgttcagcgatggtgtcagcgtagtctgctggtttgaactccctgaacaggtttccttccttgtcctttatcctcactataccatcgtagacgtcccatacgccgtttttaacaagacctgtgtggtatgtctcgatgttgcccagtgagttcacgaggtcaatgttctcctcgaatattggaactgcaagttccagggtggcctctgccagttcaacgttcctctgggccttctgaaggaggtccttctgtgtttcatcgtccagttctgttgatatacctcctggtgttgaggaggttgggtgaattggccttccgcctgtggccctgacgatttccagagcatttttacgtaactctatggcctgaagagcaacatcaggggcgtcctttattatctggaagacgttccttgtctttctgtccttacctgctatgaagtcaggggctgcaaggaagtagaagtgcagaccatgggagtgcatgtatgagccccagttcatgatctccctcatcttgtaggctgcaggaaggacatcgtcaggttcgaatccaaagcaggcgtcaacagcctttgcggctgccaggtggtgctgcacgtcacagataccgcagatccttggaactatccttggggcttcctctatgggtcttccctggaggaacttttcgaatccacggaattccataacatggagccttgtgtcctcaacattacctgcatcatcaaggtgtacggtaatcttggcgtgaccttcaatacgggtcacaggttccattgtgagtttaaccatttatgcttcagctagctgttttttgattggtgatggaccaagggcccttatcctgtcaaccatcatcttgacggtttcggcgaatttttcaccttctgatgcggatatccagtcgtggtggatcctttccctgccaattccaagttcatctgccagtttgtagatcagtctcattctcctgtcgagcttgtagtttcctgcgtcgtagtggcagtcaccgtggtggcatcctgttacgagaacaccgtcagcgccttccctgaatgccttgaaaacaaactgtggctctatccttcctgagcacatcacacggataaccctaatgtttgtagggtactgcatccttgctgttcccgcagtgtccgctccaccgtaggaacaccagttacaacagaacatcacaatttttatgtcatcttcagccatctatttaccctccttctttattttcattggtatgagtgctgctggaagtgtgaatgtgtagaatgttccaacaatgtcatccagctgttcagccacttcctcagggtcgacggttttgtcctcttcgaccttgtagtcagaggctatggcacttatcattttggcaccctggtcctcgacacgtgctgttggaccatagcagccacggcatggtatggctatgcttgggcactctgcaccgcagattgatacagttgctgggcccatgcagatgagtccctgtggtatgagacagaggtcatcctctggtttaccaacctcgaactgcctctttatgaagtccattgcaaggccttctggtggtttttcccttgggcagacttcacagaggtttgtgcttggcagttctatttcttcacctttgaggagtgccataacgacctcagcagcaacatctgaccttggtgggcatcctggaacttcaaagtcaacgtctatgacttcacccagtggtttgacccttccctcaaggtgtggtacgtcttcagatggtatgacgccctcttcgtttggtgttgttatggagttgatgtaggcttcctctatgacctcatccttgtcccagaggttcctgagacctggtatgccgccgtatacagcacatgtaccgtaacttatgacaaatttggccttttcccttagttcctctgcgaattccctgttttcatcgtttacgattcctccctcaatgaccacaacatcgagttcagggatttcatcgtattttgtgtccattaaaacagggctgaactcgaagtcagcgtgttccatgacatcaaggagcttttcatggaagtctgcaatggacaggtgacagccggagcatcctccaagccacattgttccgatctttattttttcagccattgaagtaagtaggaagcagggagcaggggaaagaaaattgacaactgtacaagattaatcgcgtctctgagcaatgaccaaatacatctacctccacggttttcttccagccccctatctgcgaaagcacaagatattagcaagcgtttcgcccaaattcacatacagctaacaatccctgatctcaatgctggtgaattttctcagttaacaatcacgcgccaaattcaacaagttgccgcaattttccctgataattctgaaccaataacgctgataggttctagtttaggcggtttaactgctgcttatctaggacagcgatatttacaagtacaacgcttagttttattagcgccagtttggttttttatcccattggttgcccaaaatgggtgaagaagctgtcacaagttggcaacaaacgatataggttctctcttctgccgtta

SEQ ID NO: 182 - DNA, 6695 bp, Artificial Sequence
  Synthetic Construct- SEQ ID NO: 182, example 182: a designer hox-promoter-controlled Heterodisulfide reductases (HdrABC, HdrDE) DNA construct (6695 bp)
agaaaatctggcaccacaccgcagaaatataggggctaggagttgagggtactctggttcgtcaagcatttgggatgatttcccctcacaagttcctcaaattattctcctataaacaatagatataaggtcaaaacttgagttatgagtgctgagtaaaaaattactctccacgcctcagaggtagatatgtcaggaaccgcctcctacaggcttcgggagcctgagagcagcgagctctgatcccgccggccccatctccttcagctcgctgacgaacttcctgacctcttttgccaggatctcgccctcactggcggcgcaccagatgatcttgaccctcccggggttgatccccaccttctccaggacccccctgaggacctggacccgctggtaggcctggtagttccccttgttgtagtggcactcgccgaggcggcagccggatatgagaacgccgtcggcaccccccttcagggcctcgaggacgaaggctgggtcgaccctcccggcgcacatcacccggatcgccctcatgttcgtcggatactggatccgggaggtgccggccagatccgctccggcgtagctgcaccagttgcagaggaacccgacgatgaaggggtactgccccttgaccgccgtcgccgcccggacctgggccatgatctgctcgtcggagaagagggtcatatcgatggcgtcgacggggcaggcggcggcgcaggtcccgcaccccttgcaggccgcctcgtcgacgagggcggtcccgttgacggagatcgccttccccggacaggtatcgacgcagagcttgcagcctatgcacttctcctggtccaccacggcgacgacggggtcgagggcgagctctcctctaacaagaagcctcatcgccttcgccgccgccgcctccccctgggcgatggagacctggatctcctttggtcccgaggcgcagccggcgatgaagaccccctcgatgtgggcctccaccggcctcatcttggggtgggcgatctcgaagaagccgtcggggcgctttgcgaggccgaggaggttgccgacgacgtcggcatccttattcggctcgagccccgccgagaggacgacgaggtcgtagggcttcgaacggaagccgcccaggagggtgtcctcgtagttgacgcgaaggctcccgtccacctcctccacctcggagacccggccccggatgaagttgatcccgagccgctgggcccgcatgtagaactcctcgtacccctcgccccccgcccggaggtcgatgtagtggatcgagacctccgtctcgggatacttctccttgatcagctgggcgttcttgagggcgtacatgcagcagacccgggagcagtaggcgtttccgaccgtctcgtcccgggagccgacgcactggaggaaggcgacggacttcgcgacctcccccgtcgatggccgcaccacctcgccgccggtcggccctgcggcgttgaggagcctctcgacctggagggcggatatgacgtctctatacctgccgtagccgtactcctcctttctggcggggtcgaaggactgccagccggtggcgacgatgatggcgccgacgtcgaacctgaactcctcctgcctctggtcgtacttgacggcgtcgacggggcaggcctcggcgcagaggccgcagccgatgcaggccgagggatcgatgcaggcgacgagggggaccgcctggggtatcggcatgtagatcgcctttcttttgccgaggccgaactcgtagtcgtcggggacctccacgggacagaccccggcgcactcgttgaggcagcccttgcagagcttctcgtcgacgaaccgcgccttcctgaccccggagacggtgaaccttccgacagacccctcgatgttgaggatctcggcgtaggtgacgaggtcgatgagggggtggttgtagacgtcggtcatcttcggcgcgaggacgcagatggagcagtcgttcgtcggaaagacgtcggtgaggagggccatgtaacccccgatcgtcggcctcctctcgacgaggtggacggagaggccgcagtcggccagatcgagagaagcctggatcccggctacgcctccaccgatgaccagcacctcccggctgacgggcatcgtctccccctggagggggtttaggagggccgccttcgccaccgccatccggatcaggtcttttgctttctcctgggcctgggggggctcgtccatgtggacccacgagcactgctcccggatgttcgccatctccagcatgaaggggttgatccccgcctcggagatcacccgccggaaggtcggctcgtggagccgaggcgagcaggcggcgacgacgatgctctccagcttatgctctgcgatgtcctccttgatcatatcctggcccgtatcagagcaggtgaactggaggtcccgggcgacctcgaccccagggagggttttggcgaactcggcgagggcggagggctccagaacccctgcaatgttcaggccacagtgacagatgtaaactccaattcgcattcagcagacctccgccccctcctcctcagctttcttcccctcgatcttctccagcttctccagcaccggcctcgtcgatacggagttcatcgataggcccagctcttctgggcctaggccgagggcgagccccgccatctgggtgacgtataatacggggaggctgatctcttcgccgaacttcttctccaggagcggctggttggcgtccagcatcaggtggcatagcgggcatagcgcgactacgaagtcggcgccggaggccctggcgttccggaggatccggatgagggtctcggcggccgcctcttcctcgggcatgaagatggggccgcagcagcacttcatctttaatctgaagtccgtaggctccgctcccagggtccggatcaggtcttcgaggatcgaggggttctcggggctgtcgatccccccgccgggcctcgtcaggaggcagccgtagtagggggcggccttcaggccggcgaggggccggacgaccaggtcttctgggtcctcagcctcggcgagggctttcgtgatcatctcgatgacgtggaggacctccttttcttcctcgtacttcttctccagggcctcgttcacccgctccctcagttttcggtccttcaggcggatcatcgccgcccggagcctgctgtagcagatggagcaggaggccatcactggaagctccgtcctcaccaggtttcgcgccgccagggccgtcgagacgacctcgttcgagacgtgggtggcgccgcagcagttccagtcgtcgatctccgatagctctatgccgagggctcgggagaccgccagggtcgatatctcgtactccctccccgtcgaccgggcgacgcatccggggtagtaggcgagcttcattcatttttctccctcctctttttctccggccttctcagactttccttctttcctcccgtcgtcgccgagaagctcgaagatccgcctcatctcctccgtcccctcgatcctctcccccctcgccgcctcaaagccgagctcgatcttccccttggggacgagctctgcgccgaaggccatgatctgcgccgccgagctggggctacggatcatgtactccgccgacagcaggaactccgatatcctcccatagtcgcggatctggcgggcgaagatcccctcgaagaccgagtccttgcacttcaagccctcctcctcgtagatcgtcttgagggcggcgacgaccgccatcggcctgatcttcctcgggcagcggacggtgcagaggaggcaggaggtgcagagccatatcgacctgctcgccatggcagcagccttctccccttcgaggaccagctttacgagctttcgtatgggcacgtccatcagggaggcggtggggcagctcgcggagcaggtcccgcactggatgcaggttttcacctcggccccggcgagggcgaggaccctctcccgaaacttctccccctcggccgtcatgatcgccgtcgtcttcatcgtcgtcaccgcctccgcaatgctagaagcctcctttgtcatatggcagaagcaggaaaagagaagaagcccctcgtatcaggattcctcatgtccacccagctgatggagctggacggatgcacccgatgccaggagtgcatgaagtggtgtccgaccttcgacgtgaggcaggaccgccccgagatcacccccatgtacaagatcgccaagttcagggaactcctgggaagccagcacggcctccgggcgaagctcttcggccccaagcccctcaacgaggatgagatcaacaggttcacggaagatacctactactgcaccacctgtggggtctgcggcaccgtctgcgagtccgggatcaacaccgtcgagctctgggaggcgatgaggccaaacctcgtagctcgggggaacggcccctacgggaagcagtccttcttccccggcctcctcggaaaggacaggaaccccttccaggcaaagcaggaggagcggctctgctgggttcccagtgatgccaccgttctggagtcgtcggagatcgcctacttcgccggctgcaccgctgcctataggcagcaggccctcgccgtcgcctccgtccggctgatgaacgccctggagatacccttctgcatgctcggaaaggacgagtggtgctgctcttcggctctggtgaggacgggccagcggaacatcatgaaagaacatgcagtccacaacgtcgatgctctaaaggatcgcggggtaaggacggtcctatacgcttgtgcgggttgtcagagaaccgccaccatcgactggcctaggtggtacgagggctacatcccctacaagaacatccccctctccgtttacctgagggagaagatcaggagcggcgaggtggagtggaagcggcccctcaacttcaaggtcacctaccacgacccctgccacaacggtaggcacctgatgcacgtcaatgggagggacgtggcctttgaggcccccagggacatcctgaagtccatccccggggttcagttcgaggacatggcccgttccagggagttccagaggtgctgtggcgctggcggcggcgtcaaggccgggatccccgatctcgccctcgactgcgccaaggcgaggatgggcgacgcccagctgatagcagcggacgtgatcaccagcacctgtcccttctgcaggcggaacatcatggacgggagagcagcgatggaaggatgcgacgtcaaggtcttggacgtagtcgagatgatgactgcagccatgggcttggacatcacgatccccgacaatccctacatgaagttccaggagcaggacgttctggtatgcgatgaggacgtctgcaaggtcgagacgatcgagaggaaggctgaagggaaggacctagtaggagaggcccactgaatggcgttttacacccttggtctcaccttcgggatcgtgatagcccttaccgtagcaaccttggcaatctggatctacggcctctacttcaacttcaaaaagtgggggatggggtcgaccggttatcaggacgagcttcgaaacagcttctggctatttattgcaacatggattcatcaggccttcaaagacggcgtctgggtatttgtcaaaaccctcatcctcgacgtcctccttctcaggcggaccctgaggaggagccccatcagatgggtgatgcacatgaccatattctacggttttgtcgccctcgccgccatgtctggcttcgccctctttatggacataattgagcacttcaacctcttggggctcgcccacgaggctgagatggtgaaggaaatgatggctctccccttcgacatcttcggctacctcctcctcttcggggcgacgataggggtcgcgaggaggatcttcctccgagaggtgcggtccaggacctcggcctacgacgtggtcctcctaggcggagtatttctgatcaccatcacaggcttctatgcccaatggatgcggggcaactccttcctcgtcggagacgtcttcgcgtacccgatatacgctccccacttcgccctagtccatacgatcctggccttggccctcttcgtagtgatccttccctggagcaagtacatgcacataatagctgcaccgatgacgattctagcaaacagaggaggcgagtaatgaagtaagtaggaagcagggagcaggggaaagaaaattgacaactgtacaagattaatcgcgtctctgagcaatgaccaaatacatctacctccacggttttcttccagccccctatctgcgaaagcacaagatattagcaagcgtttcgcccaaattcacatacagctaacaatccctgatctcaatgctggtgaattttctcagttaacaatcacgcgccaaattcaacaagttgccgcaattttccctgataattctgaaccaataacgctgataggttctagtttaggcggtttaactgctgcttatctaggacagcgatatttacaagtacaacgcttagttttattagcgccagtttggttttttatcccattggttgcccaaaatgggtgaagaagctgtcacaagttggcaacaaacgatataggttctctcttctgccgtta

SEQ ID NO: 183 - DNA, 3407 bp, Artificial Sequence
  Synthetic Construct- SEQ ID NO: 183, example 183: a designer hox-promoter-controlled Coenzyme F420-reducing hydrogenase (Frh) DNA construct (3407 bp)
agaaaatctggcaccacaccgcagaaatataggggctaggagttgagggtactctggttcgtcaagcatttgggatgatttcccctcacaagttcctcaaattattctcctataaacaatagatataaggtcaaaacttgagttatgagtgctgagtaaaaaattactctccacgcctcagaggtagatatgatgttaaacaatgcgatcgcaacgccggccctccagccattccaggaactcgagcagagcgtctggaagaaggagatgtgcgccggatgccggggctgtatcaccgtatgcccggccaacacgttagcctatgacctgaagctggccaggccgtaccagatcactccctgtgtcgattgtaaggcctgcctggacgcctgtcccaggactccagctaacatggataagctgtccctggacattcttgggccgcatcttgacgtttataatgtgaaggctactgcgggcaataagcgctaccagaacggcggcgccgttactgcgttgctgaagaccgcgctggacgaaggccttgtggaccgtgtgatcgtcatgggcgcggaccgctgggcacagaaggcatacgcccgggtcgtctccgactcatcgagcctggacagggctgcgggcagtatttacatgaacaacgatgccctggagacaatgaaggacatcatgaaggacgactcgatcaggaacgtggcgatcgtgggaacgccctgcgcgatacagtcgataggcctgctccggaagtcctcgaacgagtactccgtaaagctgacccagaagatcaggttcgccatcggcttattctgctttgagtcattcgatgatcggctcatccccgaagttaccaaacgactcggcgtgccgtcgtggcgtatcgcgaagatgaacgccggcgagggcaggctgaccgtcacgctgaggagtggcgaggtaaagacgctgcccctgtcgagcctggccgagttcgtcaagcccggatgccgcaagtgcaacgacttcacttcaaagctcgccgatatttccgttggaagcgtgggcagtgctgccgggtccagcgtcgttattaccaggacgcccgagggtgccgggctactcgagatcgcccgcgaggtgggcgctattgatgtggccggcggagtcgatgtcgctgcgatcgagaaggtcggcaagctgaagcttaagaaaaatggcttttaaatgtcattcggaacttacaaggaagtcatggccctcaaggccaaggacggaaagatcggcggcgtcgcccaggatggcggcgtcgtgaccacgctgctctgctacgcgctcgagaagggcgtcatcgacggcgccctcgtcgccggcaagagcgagaccccctggatgcctaagcccaccatcgcgacgaccaaggaagagatcatcgcggcggcaggcaccaagtacaccatcagcccggtcgtgtccaccatcaaggacgcagcccgcgagtacggcctcgagaagatcgcggtcgtcggcaccccgtgccagatctacgcggtccagaagatgaggctgtacggcgtcggcgcgagacacatccccgacaaggtagccatgaccgtaggcatcttctgtacggagaacttctcttatgccggcctcaggaccgttatcgaggaccactgcaaagtgcccatcgaatcggtcaccaagatggagatcggcaagggcaagttctgggtcaagggagccaaggacgtgtccattcccatcaaggagacccacaagtacgagcaggacggctgccacgtttgctccgacctgaccgccgagttcgcggacatctccacgggctctatcggcactcccgacggctggtccaccaccttcgcccgctcgaccaggggtaaggacctcctgagcaaggccatcgcagacggcctgttcgagaagaagtccatggacgagttcaagtccgctccggacgccaagatcaagagcggcctcgacctcctgggcaacctggaaaagggcaagaaggacaaggcaaagaagcatttcgacgagcgcaaggctctcggcctcttcgtaaccccggaaatcctgtactaaatggcataccagggtttcgggaaatataaggaagtcttgagcgcccggtctgcggacgaggagatccgtaacatcgcccaggacggggggaccacgacggcactgttgtgttttgccctcgagaccggcttcatcgacggggcggtgctgacgaaaaaatcgagcagggagtgggtgcccgcccagtacgtggcgacgacccgggacgagatcctccagtcggcgaagagcgtctacgcgctgtcccccagcctgtaccggctgaaggaggcgacgagggaaagggccctgagtaaggtgggctatgtggggctgccctgccagatcgaggcggtccgcaagatgcagctgtacccgttcggggcacgggatatcgtggagagcctggccctcgtcatcggcatcttttgtttcgagaacttttatcccgagagcctgaaagccattgtagaaggcctgggcgaggagcccctggaggatgtggtgcgcatgcggtgtgcctccgggaagttcaggacggagggggagaagggcattatcgtgccgctaaagcaggcgtcccggtacattcaggacggcgaccgcatctgcccggacctcgtgtcggagtgggcggatatctcggcgggctccgtgggctcggaccccggatggaatactgtcttcctcaggacgaagaagggccacgactttttccagcaggccaccggggctggcgccatagagacgaaggagatcagcgaggaagggcttaaggcactcgaaaagctggccgtagcgaagaaggaccgggcgaaaaaacatatcgcaaagcgcgaggagctcgggctttacgtgacccgggacatctactattgatgaagtaagtaggaagcagggagcaggggaaagaaaattgacaactgtacaagattaatcgcgtctctgagcaatgaccaaatacatctacctccacggttttcttccagccccctatctgcgaaagcacaagatattagcaagcgtttcgcccaaattcacatacagctaacaatccctgatctcaatgctggtgaattttctcagttaacaatcacgcgccaaattcaacaagttgccgcaattttccctgataattctgaaccaataacgctgataggttctagtttaggcggtttaactgctgcttatctaggacagcgatatttacaagtacaacgcttagttttattagcgccagtttggttttttatcccattggttgcccaaaatgggtgaagaagctgtcacaagttggcaacaaacgatataggttctctcttctgccgtta

SEQ ID NO: 184 - DNA, 5417 bp, Artificial Sequence
  Synthetic Construct- SEQ ID NO: 184, example 184: a designer hox-promoter-controlled Methyl-H4MPT: coenzyme M methyltransferase (MtrA-H) DNA construct (5417 bp)
agaaaatctggcaccacaccgcagaaatataggggctaggagttgagggtactctggttcgtcaagcatttgggatgatttcccctcacaagttcctcaaattattctcctataaacaatagatataaggtcaaaacttgagttatgagtgctgagtaaaaaattactctccacgcctcagaggtagatatgatggcagataaaaaagaagttattcaaaattggcccttagaaactggagattatgcagtgggaaatgttgaaagtccagtagcagtagtctctctaggttctaatatgaatgatgaattggtagctgcaggggctgcaatttcaggaccattacacacagaaaacttgggaatagaaaaggttgttgcaaatataatatcaaattcaaacatacgttatgttcttatatgtggatctgaggttcaaggacatattactggtaaaacagttgaagctttatatgaaaatggtattgatgaagagaaaaaatcaattattggttctcctggagctattccattcgttgaaaacttaccagtagaagctgttgaaagattccaaaaacaagtttctattgttagtatgataaataatgaggatgttagtgaaatatcatctaaaatagatgaatgtattagtaatgatcctggagcatatgatgaagatgcaatgattgttgaatttaatgaaacacctgaagaggagtttgaagttgatgaagtcacattttctgatgattcagcagttgatttagcatcaatagttctacttgaggttgaaaatcgtataagtatgatgaataatgaaataaaacaaattgcttctttagaaaaaatatcttcaggatattatgctggaaaaatagaaggtatagttattggatttattttaacattggtttttcttataattattattcaaggtttgtgattggtagatacaacagcagttataattgatgatgatttagttttagatgttaataatggtataataggaacaaaagataataatcaaaaacaacatcttccatttgatgatctggtagaaaaaatagatactctggaagtggcaattaataatctagaatcatcattagatcctagaacaacatctaatctatcacaacctggaagagaaggaatatatgaaaaagcaggattaattacaaacattgtaattggtgtgattatagcattagttttcatacttttattagtataaatggctgatgatttaataccttctcagataataattttaagttctattgttggcggattaatttgtatagcactaagtagtatacctgtggttggtggtattttttcaattattgcaacaatattaggtgttatttgtggaacaaatacacttagacacataggaaaatatagtttaggtactggagttccatcaatagtttatatgttaacagcagcaggacttgttagtatgatatgtggtgtaatgatatcaagaataattaatcaaaatttattatatccaatatttagtatgataatagcaatgataattgcttttgtaatttcactcatgtgtacacatatcttcaaaatacaagttgaaatattaagaaaatcattcataacattaacaattgcaacagtaatatcaattattggaatgtctacattgatagtttcatcctctgatattatgttaatctattcaaatgtaattaaaaatggacttataattatattaatgatattatcagtcatggcaatacaaaatccatataattcttgtatgggaccaaatgaagatcagtatagaacattatcattatccttatccaatgcatttttaatgcttataataatttcaattattagtattttaaatagttcatactggtatatttacattataatatcaattattggatggttagtttcatttaaattatatattaaatatacaaaacagcaagctgcactaataaaatggtctggactatggcctaataatgatgaagggggaatataaatgatatttgaattattaattagtataataataggatctacattaataggatttggagttcattttatacctgtaggtggagcaccagcagcattatctacaactgctggagtacctacaggagcacctatgataactattggtatgggaattacaggaatactttcagctctttcaatgacgggtcagtcagaaatagtaataattctatcaggagcaataggttcaatgcttatgatggctgtaacaatgtttttttcaaatatgatacatgtttatggggtaggtgttccattggcatcttcaaactttgaaagggatccaattacaggttttaaacaggaagaatatgtaagtcctggaacaacaggtcatggaataccaacagtttcatttataagtggggttattggagcattatttggaggaattggtggaagtttggcattttgggcaatttataattatatattgggaaattgtcatctttcatcaatctacacaaattctatttcagcaatacttgcagtaatgttattttttattattgcagtagtagcatcatacaatattggtggtacaatacaaggattttatgataagaaatttaggaaaaaaatagtttcaggtacattttcatgttttttaatatcaatattcttggctattatttatatgataatattgggtggaatttaaatggttagcatggggctcctagcagctatgggcgcccttgcgacagtagccggtgcaagcgaggacttagagtccgatgtgggttctcagagcaaccccaactcacaggtccagttggctgcccaggtgggtcacacccacaggatatacaacaaagccatctctggagagcccccatcgaacgctctttacgccgcccttgccgcagttacagctagtgtcttgatgtccgggtatggcatgaacgcgttctttgcgatcgccatcggctcggttatggccgcgatcttcaacggcatcttttctgtcaccgcctacatgggcaggaacacgagccaggcgcggttcaaccagtacgtctacctggacgttctgcggactcacaccaccgccatcatggcacatgcgtacatcactgccttctgcgtagtcaccatctcctacatcatgacagccccgtggcttccgattcagcacccgttcccgttccccctcgtcgccatgatatgggggctcgccatcggagccataggatcgtctacgggagacgtccactatggaggagagagggagtttcagaactacatcttcggggcggggctcaacgccgccaactccggtgacatcgtcaccagggccgaggctggcctgaggagctccatcgacaacgtctggttctgcgcccgattcggaggccccgtcaccgggatggccttcgggctgacggtcttcctggacaactggcggaccaccatcttcgatcccgccacccagggatggtatgcggtcctgaccgggatagtgatcgtcattctgttcatcgtctacaacagaatcctggagatcagagcgagaaagaggtacgggccctatcccgaatacaagggggacattgaggcatgattagatcgcccccagcagcagtgccggaatcacaatcagaagcacggctacgatgagcccaatcgcgaatccgaggatccccatgcccatgatgcccgactcaagtttggtcgtgcgggcaaggatctgtgccttgtaccggatggagtccatcattctgttgatcgaggtcatccggatggggcctgcctgtgtaacttcttctgccatgtgggaaatgattcaaaaaaggatattgaagatattaataatagattagatagtctagagcaaaaattagaggaatctcatggtgaattttctcaaaattatggaaaaagtataggacgagatattggaatattatatggtgtggtcttagcattattagtagttattattttaatgaaatttcatataatttagatgtttaaatttgaaaaaaaacaagaagtattcgatatttatggtgtaaaggtaggtggacaacctggtgaatatccaacagtacttgctggaactatcttttatgctggacataatattattagtgatgagaaaaaaggaatttttgataaggaaaaagcagagactttattaaatactatggatgaaatgactgataaaacaggaaatcctaatattgttcaaatatttggtgcaactagtgatgcaataataaaatatattgactttgtaacatctattagtgaatctccatttttaatagattcaacatctgcacaggcacgtatagcaggttcaaaatatgtaacagaatctggtcttgcagaaagaacaatctacaattcaattaatatgtcaattgataatgaagaaattgatacattaataaattctgatataacctcttcaataattcttggatttaatccaacacaacctggtgttgatgggaaaataaaactatgggatgatggtgctggagttttagataagggtttacttgaaattgcagatgactgtggaataattaaaccattgatggatgttgctgttacacctctaggtcaaggtggaggttctgcagtaaaaacaacatttaaggaaaaaagtatatggggttatcctgctggtagtggaattcataatgttccatcagcatgggaatggataaaacaatataaaaaggaatatccagaagtatggcctgtatgtgatattggtgcaaatatagttcagcaaatggttggtggggactttgtattatttggacctattgaaaatacaagaaaagcatttactgcatgtgcaatgactgatatgtttattgcagaggctaatgaagctattggaataaatgctgtagattctcatccatataaaaatttattatgatgaagtaagtaggaagcagggagcaggggaaagaaaattgacaactgtacaagattaatcgcgtctctgagcaatgaccaaatacatctacctccacggttttcttccagccccctatctgcgaaagcacaagatattagcaagcgtttcgcccaaattcacatacagctaacaatccctgatctcaatgctggtgaattttctcagttaacaatcacgcgccaaattcaacaagttgccgcaattttccctgataattctgaaccaataacgctgataggttctagtttaggcggtttaactgctgcttatctaggacagcgatatttacaagtacaacgcttagttttattagcgccagtttggttttttatcccattggttgcccaaaatgggtgaagaagctgtcacaagttggcaacaaacgatataggttctctcttctgccgtta

SEQ ID NO: 185 - DNA, 5042 bp, Artificial Sequence
  Synthetic Construct- SEQ ID NO: 185, example 185: a designer hox-promoter-controlled Methyl-coenzyme M reductase (Mcr) DNA construct (5042 bp)
agaaaatctggcaccacaccgcagaaatataggggctaggagttgagggtactctggttcgtcaagcatttgggatgatttcccctcacaagttcctcaaattattctcctataaacaatagatataaggtcaaaacttgagttatgagtgctgagtaaaaaattactctccacgcctcagaggtagatatgatggataatgagaaaaaattattcttaaaggctttaaaagaaaaattcgatgaagaccctgaagaagaaaacactaaattgcactgctatggtggatgggaacaatccgcaagaaaaagagaatttgctgaagaagctgaaaaagctgtagaagcacgtggaggattaccattctacaacccagatataggtgtacctcttggacaaagaaaattaatggcataccaagtatctggaacagacacatatgtagaaggagacgaccttcacttctgtaacaactctgcaattcaacaattagtagacgatattaaaagaactgtaattgtaggtatggatacagctcacggtgtacttgaacaaagattaggtgtagaagttactcctgaaacaatcaacgaataccttgaaacaatcaaccacgcactccctggaggagcagttgtacaagaacacatggtagaagttgaccctggattagtaactgattcctacgcaaaaatattcactggtgacgacgacttattagatcaattagatcaaagatttgtaatcgacatcaacaaagagttccctgaagaacaagctgaaatgctcaaaaaatacataggtcagaagacctaccaagtaagtagagtacctacattagtagtacgtgcttgtgatggaggtacaacctccagatggtctgctatgcaaattggtatgagtttcatttctgcatacaaattatgtgcaggagaagcagctattgctgatttctcatacgcagcaaaacacgcagatgtaatttccatggctagtgcaatgccatcaagaagagcaagaggtccaaacgaacctggaggtgtaaccttcggtgcattctctgatttggtacaaacaagcagagtaacagatgacccagctgaagtaactttagaagttattggtggagcagcaccattatacgaccaagtatggttaggttcatacatgtctggtggtgtaggattcacacaatatgctacagcagcatacacagatgaaatattagatgacttcatttactatggtaaagactacgtagaaggtaaatatggtggattatgtcaagctgaagcaacttccgaagttgtaaaagacattgcaagtgaagtaaccttatacggattagaacaatacgaaatccctgcagcattagaagaccactttggtggatcacaaagagcagcagttcttgcagcaggtgcaggttgttcagtagcattcgcaactgctaactctaacgcaggtgtaaatggatggtacttaagtcaattattacataaagaaggtcacagtagattaggattctatggttacgacttacaagatcaatgtggatcatccaactcactctctgtaagaagtgatgaaggacttattcacgaattaagaggtcctaactaccctaactacgcaatgaacgtaggtcaccaacctgaatatgcaggtattgctcaagcaccacacgcagcaagaggagacgcatttgcacttaacccattaataaaagtagcatttgctgataaaaacttatccttcgattgggctcacccaagagaatgtattgcaaaaggtgctgttagagaatttatgcctagcggtgaacgtgacttaatcatcccagctttataaatgccaacatatgaagacaaaatagatttgtatggggtagatggaaaacttttagaagaacaagtacctctagaagcaattagtccagtaataaaccctacaattaaaaatattatacaagagattaagcgttctgttgctataaacttagcaggtattgaaaaatcattagcaaacggagcatacggtggaaaagctaattttattcctggaagagaattggaattagatattgttgacaatgcagatgcaattgctgacaaaattgaaaaaatgttaaaaattagtgatgatgatgatttcaatttaaacttattaaatggaggaaaacaaatattagttcaagttccttcagaaagattaagtattgcaggtgactactctgtagcaccattagcaacaggatcagcattaattcaagctattctcgatacttttgacatcaacaaatatcaagcttctgaaattaaaacagcagctatgggtggatacccacacaacgtaaaattaggcggagcattaactaccttattaggtcaaacaactcaccttgaaggattaggttacagtctaagaaacattggagcaaaccacgtagtagctattacaaagaaaaatactcttaacgcagtagctttatcctctattttagaacaaactgcaacattcgaaatgggtgacacagtaggtgcattcgaaagaagccaccttttaggattagcataccaaggattaaacgcaaacaacatagtttatgacttagtaaaagaaaatggtaaagcaacactcggtgatgtaattatttcattattatctagagctttagatgatggagtaatcagagtaaaagaaacattaccttccggattcaaattatacgaaccagttgactgggcattatggaatgcatatgcagcagcaggtcttattgcagctacaattgttaacgtaggtgcagcaagagcagctcaaggtgtagcatcatctatattatactttaacgatatcttggaatacgaagcaggtttacctggtgtatactttggtagagtaatgggtacaggtgtaggtatgagtttcttctcacacggtatttacggtggtggaggacctggtgttttcaacggtaaccacgtagtaacaagacacagtaaaggatatgctatcccatgtaacgcagcagctatggctttagatgcaggtacacagatgttctctgtagaatctacatcaggtttagttggagaagtatatggtagcgtagacaatttaagagaaccagtaaaatatgttgctgaaggagctagtcaagtaaaagataaactctaaatgatagaaatgattggaaaaaatacacatatagttgactgtagggaaacacgcggaataggtgaaggtggtggaattgctcagcgtggaacatatgcacaatgtggggatgaattacttgctgttgcaatgtctccaggacgtagacatattacaaaaccagtttgtgaaataacatttgctctaagagaatcaaatattcaaacaagtaccttggttcttaatgcaggttctggagtaccaaaagacacgcctagtggtggaggacaaggtttatttggtgtaactcctaaggaaatttcccagatgagtagacataatattgtattgttccattttggaggagtaaaaaatcatataatatacaaggcaaaacatgctcttaaacatattaataaacctgttattattatagcacaatatccattggattttgaagattttgcaaaaataggagtaaatactgttgcagtaaaacctgaaaaatctgaaacacagggtactattgttgaactcataactgatgttattcgtggagaatcatgtactcaagagaaattagatgaaataataaataaagtggaaacatccattgtaaaatatactaagtaaatggcatatgaagtacaatattatcctggagaaagtgttattgcagaaaaccgtaaaaaacacatgaatccagatcatgaacttaaaaaacttagaaatattgcagatgacgatatagtaaaacttttaagtcacagaaacccaggagaaggttacaaaacagtacacccacctcttgatgaaatggactttgaagaagatactatgaaagacttcgtagaaccaatcgacggagctaaaaaaggaattcgtataagatacatacaattcgcagactcaatgtataatgcacctgctcaaccatacgacagagcaagatcatacatgagaagattcagaggagtagatacaggtacactctcaggaagacaagtaattgaaatgagagaatctgacttagaagaaacttccaaattattattagaatctgaattctttgattccgctaaaacaggtttaagaggagcaaccgtacacggtcactcattaagacttgatgaagacggattaatgtttgatgcattacaattatacgtattcgataaagaaactggtcacgttgtatacgtaaaagatcaagtaggagtagaacttgatgaacctattgatgtaggagaaccattaccagaagacgaacttaagaaaataacaaccatctacagatctgacaacgtcagcttaagagatgatgaagaagttattaaagtagttgaagctattcacttcgcaagaactgatggtggatatggtttagaagtattcaacaacgatttaaaaagtaaattaggtggtaactaatgaagtaagtaggaagcagggagcaggggaaagaaaattgacaactgtacaagattaatcgcgtctctgagcaatgaccaaatacatctacctccacggttttcttccagccccctatctgcgaaagcacaagatattagcaagcgtttcgcccaaattcacatacagctaacaatccctgatctcaatgctggtgaattttctcagttaacaatcacgcgccaaattcaacaagttgccgcaattttccctgataattctgaaccaataacgctgataggttctagtttaggcggtttaactgctgcttatctaggacagcgatatttacaagtacaacgcttagttttattagcgccagtttggttttttatcccattggttgcccaaaatgggtgaagaagctgtcacaagttggcaacaaacgatataggttctctcttctgccgtta

SEQ ID NO: 186 - DNA, 5450 bp, Artificial Sequence
  Synthetic Construct- SEQ ID NO: 186, example 186: a designer hox-promoter-controlled Formate dehydrogenase DNA construct (5450 bp)
agaaaatctggcaccacaccgcagaaatataggggctaggagttgagggtactctggttcgtcaagcatttgggatgatttcccctcacaagttcctcaaattattctcctataaacaatagatataaggtcaaaacttgagttatgagtgctgagtaaaaaattactctccacgcctcagaggtagatatgatggttaacctgaccattgacggacaaagggttacggctccagagggcatgaccatcctggaggtggcccgggaaaatggtatccatatccccaccctgtgccaccatccaaagttgcggcccctggggtattgccgtctgtgcctggtcgacatcgagggcgccgcaaaacccatgacggcctgcaatacgccggtcgccgagggtatggtgatccggaccagcacgcctgttatagaggagatgcgcaagggtattattgaaatgcttttaagcctccacccggaggactgcctgacctgcgaaaaagcaggtaactgccagctccaggattgcgcctacacttacggtgtaaagcatggcgaactgccagtaaaacgcgaggaattgcccgttttgaaggaaaatcccttcattgtgcgggattataataaatgtatcgtttgcggccgttgcgtccgcgcctgccaggaggtgcaggtccagagggtcgtggacctggtgggtaaaggcagcgccgcccgggtgggggcgacgaaggccggagcggaagtaagcctggaagaagggggctgcgtcttttgcggtaactgtgtccaggtctgcccggtgggagctctgacggagaaggccggcctgggccagggccgcgagtgggagttcaaaaaagtccgcagtatttgttcttactgcggcgtgggttgtaatctcaccctttatgtaaaagatggtaaggtggtaaaagttaggggttacgaaaaccctgaggtaaacaacggctggctgtgcgtaaaaggccgctttggttttgactatattcacaatcctgacaggataaccaggccgttgatccgggagggagatagggaaaaaggctatttccgggaggcttcctgggaagaagctttagcccttgtatcccagaaattaactcagattaaaggcagctacggctctgaagctctgggctttctttgttcagctaaatgtaccaatgaagagaattatctcttacaaaagctggcccggggggtactgggcaccaataatgttgatcactgtgctcgcctctgacactcttctacagttgccggtctggcaacaacctttggcagcggtgcaatgaccaattctatcgctgacatcgccagcgcagattgtatctttgtcattggcagcaatacaaccgagaaccatcctgttattgcccttaaagtaaaagaagctgtccgtcgtggagccaggctcattgttgctgatccccggcgtattgaactggtgaacttcagttacttgtggttaagacaaaaacccggaacagatcttgctctgctgaatggactgcttcatgtaatcatcaaggaagagctttatgacaaagaatttattgcccagaggacggaaggttttgaggctctaaaacttgccgtagaggagtatacaccagcaaaggtgtcagaagttacaggtgttccggcaggcgatattatcgaggcagcaaggacttatgcccggggtccgagctctactattttgtacgcaatgggaataacccagcatataactggtacggccaacgtgatggccctggccaacctggccatggcctgtggtcaggtcggtaaagaaggtaacggcgtaaatcccctgcgggggcagagcaatgtccagggtgcctgcgatatgggtggattacccaatgtattaccgggataccaaccagtaacagatccgggggttcgccataaatttagcgaaacctggggggtaccggacttacccggagaacctggcctgacattaatggagatgatggcggcagcccaagaaggcaaattgaaagggatgtatattttaggagaaaaccctgtcttgactgatccagatgtctcccatgtaaaagaggcgttaaagaacctggagtttctggtggtacaggatatttttttgacggagacagccaggatggcggatgttgttttacctggagcttcctttgcggaaaaggaaggtacctttaccagtacggagcgccgggtgcagcttttgcataaagccattgaacctcccggtgaagcacggccggattggcttattttaaacgatttgttgctgttaatgggatatccgcggaaatattcgtcgcctggggagataatgcaggagatagcagggttaactcccagctatgcgggtataacttatgagcgcctggaagataaagggttacagtggccggtgctttccctcgaacatccgggtacacccgttctccatcgggaaaaatttagcagaggttatgggcagttccaggtagtgcattaccggccgccggccgaagaacctgatgaagagtacccgttcttatttaccactggcaggaatttgtatcactatcatactgttatttcccgtaagtccagggggctggaagagatgtgtcctgctcctgtggtggagattaatgataacgatgcagcccgtttgggtatacgggaaggagaaatgattgagattgtttcccgacgtggtaaagtaagggttaaagcattggttacggatcgcataccccggggccaggtatttatgaatttccatttccatgaagcagcagccaacctgcttacaattgctgccctggatccggttgctaaaataccgattataaaacctgtgctgtagttgggagaggtggtatttagcacctggggaggaaaagttgtcgatcaccggggcggtccgtcggggggaggaccgtcctgggccggggaatttggcggtcggcagttaaaggcctttattggctgggatggtctcgtagtcaccgacccggccgtagacctgctggctgctttacaggcttactaccaggccgtccagggggaatcctgcggccgctgcgtaccctgccgggtagggaccagggttatttacaatgtcctggtacgcatcgccgggggcgaaggccttccctccgatttagaccttctccgacgggtggcctggattgtacgggatggttctctgtgcgagctcggccaggctggggccaaagctgttcttgattttttagattattatagcgaggccttgcgacctttcctggaggatagcggcagggtcgccgggggtcaacggagaccagggcctggaggccgggtgcaggttctggcttccggacgggtcctggtggggaacgaccgcggaaagggagcggccgccgcttccccggcagccggtttaacctataaaccttttgttactgcgccctgcctcaagcggtgcccggcccacctggacatcccggcttatattgacgccattaaggatggccgctatgaggaatccctggccatcatccgccagcggaccgccctggccggtgtcctgggacgggtctgcgtccacccgtgtgaagaaaactgccgccgcggcaatgttgacgaacccctggccatccggggcctgaagcgcttcgtagccgattatgaggtgaaacgcggccgccggccggtcgccgtctgcgggggtaatctctttacgggaccctggcggccggcaggacaggccggtggggaagaaacaacggccgtcacttcaggcaagaaggtagccatcatcggtgccggaccggcgggtctcagcgccgcctaccagctcgccggtcggggctataaagtgactattttcgaggccttgccggtggccggcggtatgctggcggtgggtattcccagctaccggttgccacgggatatcctggctggagagatcgaggccatcaaggctctgggcgtaaccatcaacctcaacacccgggtcggcgtcgacgtgaccatggaccaattacagcgcgattacgacgccgtctttattgctaccggcctccatgccagctcccgcatgggagtagccggcgaggatgaaggctatggaggatttatccccggggtcaagttcctgcgagatttgaacctggaccggtgtccttccctggagggcaaggtggtggccgtcgtcggcggcggcaatgtagcgatggattgcgcccgttccgccctgcgccggggggcccgggaggtgcaccttatttaccggcgttcccgggcggaaatgccggcccatgcgaccgaggtcagggatgccgaggccgagggggttatttatcacttcctggttaatcccaccgccctggtagcggaaaaaggcaatatcaagggtatgcagtgcgtccggatgaaacttggcgagccggacgattctggccggcgccggcccgtacccgtgccgggaacggagtttttcctgccctgcgatattgtggtgccggctatcggccaggcggccgacctgtctttcctggacggccggatcgaggtgggcaaacgtggtaccatcagtgttgacccggtgaccctggctaccagtgtccccggcgtcttcgccggcggcgatatcgtcctgggggccaggacggtagttgaggccgtggcccagggcaaccgggcggcagtttccattgaccagtacctgcgccaggggaccaccagtcccacggtagaggacgagctggacgcgtggctggaaaaggtcggcgtctatgacccggaagaggatgtaggaatctacggcggccggccgcggcaggcagaaagggtggcgccgttggccgagcgggtaaaggacttccgggaagttgaaggcggcttcgatttctacgcaggcagggccgaagccgaacgctgcctgcgctgttaccgggtcgggatgatggtcctggccggagagggggagagtaatggttaatgaagtaagtaggaagcagggagcaggggaaagaaaattgacaactgtacaagattaatcgcgtctctgagcaatgaccaaatacatctacctccacggttttcttccagccccctatctgcgaaagcacaagatattagcaagcgtttcgcccaaattcacatacagctaacaatccctgatctcaatgctggtgaattttctcagttaacaatcacgcgccaaattcaacaagttgccgcaattttccctgataattctgaaccaataacgctgataggttctagtttaggcggtttaactgctgcttatctaggacagcgatatttacaagtacaacgcttagttttattagcgccagtttggttttttatcccattggttgcccaaaatgggtgaagaagctgtcacaagttggcaacaaacgatataggttctctcttctgccgtta

SEQ ID NO: 187 - DNA, 2324 bp, Artificial Sequence
  Synthetic Construct- SEQ ID NO: 187, example 187: a designer hox-promoter-controlled 10-Formyl-H4 folate synthetase DNA construct (2324 bp)
agaaaatctggcaccacaccgcagaaatataggggctaggagttgagggtactctggttcgtcaagcatttgggatgatttcccctcacaagttcctcaaattattctcctataaacaatagatataaggtcaaaacttgagttatgagtgctgagtaaaaaattactctccacgcctcagaggtagatatgttgtccaaggtacccagtgatattgagattgcccaggcagccaaaatgaaaccggtcatggaactggcccggggactgggcatccaagaggacgaggtcgagctttatggtaagtacaaggccaagatctccctcgatgtctatcgtcgcctcaaagacaagcctgacgggaaactaatcctggtaaccgccattacccctactccggccggcgaagggaaaactactaccagtgtcggtctcaccgatgccctggctcgcctggggaaaagggtgatggtctgcctgcgggagccctccctgggacccagctttggtatcaaaggcggtgccgccggcggtggttatgcccaggtagtacccatggaagatatcaacctgcacttcaccggcgatatccacgccgtcacctatgcccacaacctgctggcggccatggtggataaccacctgcagcagggtaacgtcctgaatattgatccccgtaccatcacctggcgccgggtcatcgaccttaatgaccgggctctgaggaacatagtcatcggcctgggtggcaaagccaacggcgtaccgcgggagacagggtttgacatctccgttgcctcggaggttatggcctgcctgtgcctggccagcgacctcatggatctcaaggaacgtttcagccgcattgttgtcggctacacctatgacggcaaaccggtcaccgccggcgatctggaggcccagggttccatggctcttctcatgaaggacgccattaaacccaacctggtccaaaccctggagaatacgccggcctttatccacggtggtcccttcgccaatatcgcccacggttgcaacagcattatcgcaaccaagacggccctgaaactggcggattatgtcgtgacggaagccggtttcggtgccgacctgggtgccgagaagttctatgacgttaaatgccgttatgccggctttaaacccgatgccacagtcatcgtggctaccgtccgcgccctcaagatgcacggcggcgtacccaaatcagacctggccactgaaaacctggaagccctgcgggaaggctttgccaacctggagaaacacatcgaaaatatcggcaagttcggcgtaccggcagtcgtggccatcaatgccttccccaccgataccgaggccgagctaaatctcctctacgagttgtgcgccaaagctggggccgaagttgccctctcggaagtctgggctaagggcggcgaaggcggtctggaacttgcccggaaggtgttgcagaccctggagagcaggccatccaacttccatgtcctctacaacctggacctgagtattaaagacaaaattgccaaaatcgccaccgagatctacggggccgacggcgtcaactatacggccgaagccgacaaagctatccagcgttatgaatccctgggctacggcaacctgccggtggtcatggccaagacccaatactccttttccgatgacatgaccaagctcgggcggccgcggaactttaccatcaccgtgcgcgaggtgcgcctctcggccggagcaggctttatcgtccccatcaccggcgccataatgaccatgcccgggctgcccaaacgcccggcggcctgcaacatcgacatcgatgccgacggcgtcattaccggtcttttctagtgaagtaagtaggaagcagggagcaggggaaagaaaattgacaactgtacaagattaatcgcgtctctgagcaatgaccaaatacatctacctccacggttttcttccagccccctatctgcgaaagcacaagatattagcaagcgtttcgcccaaattcacatacagctaacaatccctgatctcaatgctggtgaattttctcagttaacaatcacgcgccaaattcaacaagttgccgcaattttccctgataattctgaaccaataacgctgataggttctagtttaggcggtttaactgctgcttatctaggacagcgatatttacaagtacaacgcttagttttattagcgccagtttggttttttatcccattggttgcccaaaatgggtgaagaagctgtcacaagttggcaacaaacgatataggttctctcttctgccgtta

SEQ ID NO: 188 - DNA, 1487 bp, Artificial Sequence
  Synthetic Construct- SEQ ID NO: 188, example 188: a designer hox-promoter-controlled 10-Methenyl-H4 folate cyclohydrolase DNA construct (1487 bp)
agaaaatctggcaccacaccgcagaaatataggggctaggagttgagggtactctggttcgtcaagcatttgggatgatttcccctcacaagttcctcaaattattctcctataaacaatagatataaggtcaaaacttgagttatgagtgctgagtaaaaaattactctccacgcctcagaggtagatatgctagcgccgggccgcctcgactgtattcttcaagagcatggcaatggtcatgggacctaccccgccgggtacgggagtgatccaaccggccttctgggccgcactctcgaagtggacgtcgcccaccagctttttctcgccgacccggttgatacctacgtcgataactaccgcgccctctttaatcatatccccggtaatcaactccggcttccctacggccgcaatgagaatgtcggcctgccggcattcggctgccaggtccctggtgcgggagtgacagatggtcaccgtggcgtggcgggccaggagcatcattgctactggcttgccgacgatattgctccggccgacgaccactgcctttttacccttgggatcaataccggctttttccagcaaaaccatacagccgtggggtgtgcatggatagaagcatttatcgccgataaccaggttgccgacgttggccgggctgaacccgtcaacatccttttccagggcgatggcatcgatgactttcttctcatcaatatgatcaggcaacggcaactggaccaggatgccgtgaatcttgggatctttattgagctggtcgatcagctttaagagttcggcctggctggtcgccgccggcaggcggtgaacctcggagtagataccgacctcctcacaggcgcggtgcttgttacggacgtacacctgggaagccgggtcttcgcccaccaggactacggccaggcctgggttaataccttccgcctttaaccgggatacctcctcctttacttcagcccttacttcggcagcaatctttttcccgtcgaggatctgggctggcattgaagtaagtaggaagcagggagcaggggaaagaaaattgacaactgtacaagattaatcgcgtctctgagcaatgaccaaatacatctacctccacggttttcttccagccccctatctgcgaaagcacaagatattagcaagcgtttcgcccaaattcacatacagctaacaatccctgatctcaatgctggtgaattttctcagttaacaatcacgcgccaaattcaacaagttgccgcaattttccctgataattctgaaccaataacgctgataggttctagtttaggcggtttaactgctgcttatctaggacagcgatatttacaagtacaacgcttagttttattagcgccagtttggttttttatcccattggttgcccaaaatgggtgaagaagctgtcacaagttggcaacaaacgatataggttctctcttctgccgtta

SEQ ID NO: 189 - DNA, 1487 bp, Artificial Sequence; identical to SEQ ID NO: 188
  Synthetic Construct- SEQ ID NO: 189, example 189: a designer hox-promoter-controlled 10-Methylene-H4 folate dehydrogenase DNA construct (1487 bp)

SEQ ID NO: 190 - DNA, 1565 bp, Artificial Sequence
  Synthetic Construct- SEQ ID NO: 190, example 190: a designer hox-promoter-controlled 10-Methylene-H4 folate reductase DNA construct (1565 bp)
agaaaatctggcaccacaccgcagaaatataggggctaggagttgagggtactctggttcgtcaagcatttgggatgatttcccctcacaagttcctcaaattattctcctataaacaatagatataaggtcaaaacttgagttatgagtgctgagtaaaaaattactctccacgcctcagaggtagatatgctactctaccttgggacggggatacaggccggcttccttgacgatggtggggatgatatcttcccacatgacggccatgatatggacgccggctacaccctcgatggactgcaggtgtttaatctgttccacacagatggccaccccttcggccttggggtcggaggctttttccatgcggttgacgatttcgtcggggacaatcatcccggccaccgattgttgcatatatttggcggcccgggcggatttcaggggcatgacgccggcaataattttggctcttttatgcaggccgcgctcccggaccagggccataaagcgttcaaaacgctccatatcaaaaatgcactgggtttgaataaagtcggcgccggcattgatcttcttctccaggcgcatgacccggaactcaaaggggtcggcaaaggggttggcggcggcgccgatgaagaagcggggttcctggcccttaatctcttcaccgcaggcgaattttttctcatcccggaggtccttcacgatccggatcagctggagggaatccacgtcatggacgtttttcgccgtcggatggttaccaaaagattgatggtcgccggacaggcagaggacgttccgcatccccaggctgtaggcacccaggagatcactctggagggcgatacggttgcggtcccgaaccgtcatctggataatgggttcgcccccggcctggaggacgtggaccccagcggcgatactcgacaggcggacgatggccgtctggttgtccgtcaggttcatggcatcaacgtagtccttgaggagagcggcgtgcttcttgatctctgtaggatcggcgtgcttcggcggtccaatctcaccgctgaccagaaattgcccctgggagaggattttcgccatcttgctttcaaccattgaagtaagtaggaagcagggagcaggggaaagaaaattgacaactgtacaagattaatcgcgtctctgagcaatgaccaaatacatctacctccacggttttcttccagccccctatctgcgaaagcacaagatattagcaagcgtttcgcccaaattcacatacagctaacaatccctgatctcaatgctggtgaattttctcagttaacaatcacgcgccaaattcaacaagttgccgcaattttccctgataattctgaaccaataacgctgataggttctagtttaggcggtttaactgctgcttatctaggacagcgatatttacaagtacaacgcttagttttattagcgccagtttggttttttatcccattggttgcccaaaatgggtgaagaagctgtcacaagttggcaacaaacgatataggttctctcttctgccgtta

SEQ ID NO: 191 - DNA, 1442 bp, Artificial Sequence
  Synthetic Construct- SEQ ID NO: 191, example 191: a designer hox-promoter-controlled Methyl-H4 folate: corrinoid iron-sulfur protein Methyltransferase DNA construct (1442 bp)
agaaaatctggcaccacaccgcagaaatataggggctaggagttgagggtactctggttcgtcaagcatttgggatgatttcccctcacaagttcctcaaattattctcctataaacaatagatataaggtcaaaacttgagttatgagtgctgagtaaaaaattactctccacgcctcagaggtagatatgttaatccgctaacaaatctttacgatatgcctttaaaaagttcttgccgaaacggtcgttacccagcagtaaatcggtggtggtgactgcagtcatgatttttccatccaagggatcgagaatggccgcgtccatgccgctcgccatacatattgtcaggaagtaacggttgatgagcttcctcttcggcatgttaaacgagatgttgcttaaaccggatactgtcttcactttaaataacctcttgatttccctcaggcactggaaaaacatcaccgcgttggtgtggtttacggccagggggagaaccagcggatcgatatacaggttgctcaaatcataattcttcctgctcagggtctctatcagtccctcagttatcttgatcctttcttcagccgttttcgggataccattgtcgtcaaccgtcaggccgattaccgggcactggtattcgagtacaagtggcaatacttcttccagccgctttttttccatggatatggagttgattatcaccttgctcttatcgcccttgacggtctccagacccttttttattgcctcccctgctgtgctatcaatgcataaaggtacatcagttacttcttgcactgtatgcacaagccactccatatcggccacttcgtcacagtgggcggtatttagatccaggtaatctgctcccgcttccgcctgcctgcgggccaggtcctgcacggccgcggcgtttttgtcattaatgatttgacggacactggggatcgcgctatttagtttttcaccgatgattaacattgaagtaagtaggaagcagggagcaggggaaagaaaattgacaactgtacaagattaatcgcgtctctgagcaatgaccaaatacatctacctccacggttttcttccagccccctatctgcgaaagcacaagatattagcaagcgtttcgcccaaattcacatacagctaacaatccctgatctcaatgctggtgaattttctcagttaacaatcacgcgccaaattcaacaagttgccgcaattttccctgataattctgaaccaataacgctgataggttctagtttaggcggtttaactgctgcttatctaggacagcgatatttacaagtacaacgcttagttttattagcgccagtttggttttttatcccattggttgcccaaaatgggtgaagaagctgtcacaagttggcaacaaacgatataggttctctcttctgccgtta

SEQ ID NO: 192 - DNA, 2942 bp, Artificial Sequence
  Synthetic Construct- SEQ ID NO: 192, example 192: a designer hox-promoter-controlled Corrinoid iron-sulfur protein DNA construct (2942 bp)
agaaaatctggcaccacaccgcagaaatataggggctaggagttgagggtactctggttcgtcaagcatttgggatgatttcccctcacaagttcctcaaattattctcctataaacaatagatataaggtcaaaacttgagttatgagtgctgagtaaaaaattactctccacgcctcagaggtagatatgatggctttaacaggattaaatatatttaaattaacaccaaaaaagaattgtaaggattgtggtttccctacttgtctagctttttcaatgaaagtagcagcaggagctgtggaaataggaaaatgtcctcatatgagtgacgaggcaatggaaaaattagctgaagctactgcaccaattatgaagacaataactattggtaagggagataatgaatataaattaggtggagaaactgttttattccgtcatgaaaaaacttttgtaaatagaaatagatttgcagttgcattttccgatagtatggatgatgcagaagtagatgctaagatccaacatataaaagatgtagattatgttagaatcggtgaacaaatgaaaaccgaatttgctgcaataaaatatgcaggaaataaagacaaatatcttgctttaataaacaaaataaaagcaagtggagtaaaagtagcttatgccctagtttgtgaagatgtagcagtaatgaaagaagctcttccactagttaaagatgaaaatccattagtttatggagctaataaagataattttaaagaaatggttgaacttgtaaaaggagataaattagctttaggtgtaaaggcagacggattggaagctctttatggtttagtagaagaaatacaaaaattaggatataagaacttagtacttgatccaggtggaaaatccattaaagaagcttttgaaaatacagttcaaattagaagaataaatattgaaggtcaggatagaacttttggatatccttctataatattcctagatgaacttactaaagctgataaatttatggaagtagctttatctacattatttactttgaaatatggttcattacttgttttaagtgatatggattattcaagagcacttcctctttatagtataagacagaatgtatttacagatccacaaaaaccaatgacagttgatttgggtatacatggaattaacaacccagatgaaaactcaccagtattatgtactgttgactttgctcttacttacttcctagtttcaggagaagttgagagatctaaagttccagtatggatggttataccagatgcaggcggatattctgttcttacatcttgggctgcaggtaaatttactggtgctgcaatagctgatgaaataaagaaatgtggaatagcagagaagactaagaacagaactcttttaatcccaggaaaggttgcagttttgaaaggtgaattagaggaacttcttccagactggaatatagtaattagtagtacagaagctatgtttattcctaagttattaaaagagttaactgctaagtaaatgttcaaaaaaccaacacaaaaattttcaggcaaaattggtgaagttgaaattggaacaggagaaaaagcattaaaattaggaggagaatcagtattaccattttatacttttgatggagatacaggaaataccccaaaagtaggtatggaaattttagatgtatatccagaagactggatagatcctttaaaggacatatacaaggatgttgcaaaagaccctgttaaatgggcacaatttgtagaagaaaaatatagtccagattttatatgcctaagacttataagtgctgatccaaacggtacagatgctgcaccagaagattgtgctaaaacagctaaagcagtagttgaagctataaaaactccattagtagttgcaggtacaggaaatcatgaaaaagatgcaaaattatttgaaaaagttgctcaggaaactgaaggacacaatatacttttaatgtcagcagtagaagataactataagtcagtaggagctgcaggtgtaatggcttataatgacaaagttgtagctgaatcttcagttgatataaaccttgcaaaacaaataaatattttaatgaatcaacttggaatagacaatacaaagtttgttgacaacgtaggatgtgcagcaggtggatatggttatgaatatgttatatcaactttagacagagtaaagcttgcagcacttggtcaagatgataaaactcttcaagttcctataataagccctgtttctttcgaagcttgcaaagtaaaagaagcaatggattcagaagaagattcaccacaatggggaagtcaggaagacagaacagtttccatggaagttgcaacagcatccggagtattagcatcaggaacagatgctgtaatattacgtcatccaaaatctgtagaagtaattagaaactttattaaggaattattaggttaatgaagtaagtaggaagcagggagcaggggaaagaaaattgacaactgtacaagattaatcgcgtctctgagcaatgaccaaatacatctacctccacggttttcttccagccccctatctgcgaaagcacaagatattagcaagcgtttcgcccaaattcacatacagctaacaatccctgatctcaatgctggtgaattttctcagttaacaatcacgcgccaaattcaacaagttgccgcaattttccctgataattctgaaccaataacgctgataggttctagtttaggcggtttaactgctgcttatctaggacagcgatatttacaagtacaacgcttagttttattagcgccagtttggttttttatcccattggttgcccaaaatgggtgaagaagctgtcacaagttggcaacaaacgatataggttctctcttctgccgtta

SEQ ID NO: 193 - DNA, 4859 bp, Artificial Sequence
  Synthetic Construct- SEQ ID NO: 193, example 193: a designer hox-promoter-controlled CO dehydrogenase/acetyl-CoA synthase DNA construct (4859 bp)
agaaaatctggcaccacaccgcagaaatataggggctaggagttgagggtactctggttcgtcaagcatttgggatgatttcccctcacaagttcctcaaattattctcctataaacaatagatataaggtcaaaacttgagttatgagtgctgagtaaaaaattactctccacgcctcagaggtagatatgatgactgattttgataaaatcttcgagggtgctattccagaaggtaaagagccggtagccctgttccgggaggtttaccacggcgccattacagctaccagttacgcggaaatccttttaaaccaggccatccggacctatggtcccgaccatcccgtcggttatcctgatacagcctattacctgccggttattcgctgtttcagcggggaagaggtcaaaaaactgggggatttaccacctattttaaaccgcaagcgagcgcaggtaagccctgtcctgaatttcgagaatgcccgcctggccggggaagccacctggtatgcggccgagatcattgaagccctgcgttaccttaaatataagcctgatgaacccctcctgcccccaccctggacgggtttcatcggcgacccggttgtccgccgtttcggtatcaagatggtcgactggaccattccgggtgaagctattatcctgggtcgagccaaagactcgaaggccctggccaaaatcgtcaaggaactcatgggtatgggctttatgctcttcatctgtgatgaagcggtagaacagctgctggaagaaaacgtcaaactggggattgactatatcgcctatcccctggggaacttcacccagattgttcatgccgccaactatgccctgcgggctggtatgatgttcggtggcgttaccccgggtgcccgtgaagaacagcgcgattaccagcgccgccgtatccgcgcctttgtcctttatctcggcgagcatgacatggtcaagacggctgccgccttcggggccatctttaccggctttccggtaatcaccgaccagcccctaccggaggacaaacagatcccggattggttcttcagcgttgaggactatgataaaatagtccagatagccatggagacccgtgggatcaagctcaccaagatcaagttggatctgcccattaactttggccctgcctttgagggcgagagtatccgtaagggcgatatgtacgtagaaatgggcggcaaccggacgccggcctttgagctggtacgcaccgtttcggaatccgagatcactgatggtaagattgaagtcataggtcctgatattgaccagataccggaagggagcaaactgcccctgggcattctggtggacatctatggccgtaaaatgcaggccgattttgaaggagtcctcgaacggcgcatccacgacttcatcaactacggtgaaggtctctggcacaccggccagcgtaacatcaactggttgcgggtcagcaaagatgccgtagccaagggtttccgtttcaagaactacggtgaaatcctggtagccaaaatgaaagaagaattccccgccattgtggaccgggtccaggtaaccatttttaccgatgaagccaaggtcaaagaatatatggaggtcgcccgggagaaatacaaggaacgtgacgaccgcatgcgcggccttaccgatgaaacagtggataccttttactcctgcgtcctctgccagtcctttgcccccaaccatgtgtgtattgtcaccccggaacgggtgggcctgtgtggagccgtaagctggctggacgccaaggcgtcctatgaaatcaaccatgccggtcctaaccagcccatccctaaagaaggggaaattgatcccattaagggtatctggaagagtgtaaatgactatctctatacagcttccaaccgtaacctggaacaggtctgcctgtacacccttatggagaatcccatgacctcctgcggttgctttgaggccattatggccatcctgccggagtgcaacggcatcatgattaccaccagggatcacgccggcatgactccttcggggatgaccttctctaccctggccgggatgatcggcggtggcacccagaccccgggctttatgggcatcggccgcacctatatcgtcagcaaaaagtttatttccgccgatggtggtatcgcccggatcgtctggatgcccaaatctctgaaggatttcctccacgacgagtttgtacgtcgtagtgttgaggagggcctgggagaggactttatcgataaaatagctgatgagaccatcggtaccaccgtggatgaaatcttgccctacttggaggaaaagggacacccggccttgaccatggatcccattatgtgaatgcccaggttccgcgatctctcccataattgtaggccctcagaggcaccacgggtcatggaacccaaaaacagggaccgcaccgtagatccggcggtcctggaaatgctggttaaaagtaaggatgacaaagtcatcaccgcttttgaccgcttcgtcgcccagcaaccccagtgtaaaatcgggtatgaaggtatttgctgccgtttctgcatggccggtccctgccgtatcaaggcaaccgatggccctggcagccgtggtatttgcggcgcttctgcctggaccattgtcgcccgtaatgtaggtttaatgatccttaccggtgccgccgcccactgcgaacacggcaaccatatagcccatgccctggtagaaatggccgaaggtaaagctcctgattatagcgtcaaggacgaggccaagctcaaagaagtctgccgacgggtgggtattgaggtagaaggcaaaagcgttttggaactggcccaggaggtaggcgagaaggccctggaagacttccgccgcttgaagggtgaaggtgaagccacctggctgatgaccactattaatgagggccggaaagaaaagttccgtacccacaatgttgttccctttggtattcatgcctctatttccgagctggtcaatcaggcccatatgggtatggataacgaccctgttaacctggtcttcagcgccatcagggtagccctggctgactatacgggtgaacatatagctactgatttctccgacattctcttcggtactccccaaccggtggtcagcgaagccaacatgggggtcctggatccggatcaagtcaacttcgtcctccatggccataatcccttgttgagtgagattattgtccaggcggcgcgggagatggaaggagaggccaaggccgccggtgccaaaggcatcaacctggtgggtatctgctgcaccggtaacgaagtcctgatgcgccagggtatccccttggttacttccttcgcctcccaggaactggccatctgcaccggagctattgacgccatgtgcgtcgacgtccagtgtattatgccttccatcagcgccgtagccgagtgttatcatacccggatcatcactactgccgataacgccaagattcccggtgcctaccatatcgactatcaaacggctacggctatcgaaagcgcgaaaaccgccatccgcatggccatcgaggcattcaaggaaagaaaagaaagtaaccgtccggtttacatcccccagattaagaaccgggtagtcgccggctggagccttgaagccctgaccaaactcctggctacccagaatgctcaaaatcccatccgggtactcaaccaggccatcctggacggtgaactggctggcgtagccttaatctgcgggtgtaacaacctcaaagggttccaggataactcccacctgacggtaatgaaagaactgctgaaaaataatgtctttgtggtggctacgggttgctccgcccaggccgccggaaagcttggcctcctggatccggccaatgtggaaacctactgcggcgatggtctcaagggcttcctgaaacgcctgggtgaaggcgccaacatcgaaatcggcctgccgcctgtgttccacatgggttcctgtgtggataactcccgggccgtcgacctcttgatggccatggccaacgatctgggcgtagataccccgaaggtgcccttcgtagcctcggccccggaagccatgagcggtaaggctgccgccatcggcacctggtgggtatccctcggcgtaccgacccatgtcggcaccatgcccccggtagaaggtagcgacctcatttatagtattctaacccagatagccagcgacgtttatggtggttacttcatcttcgaaatggatccccaggtagctgcccggaagatccttgacgccctggaataccgcacctggaagctgggcgtacacaaagaggtagctgaacgttatgaaaccaaactctgccagggttactagtgaagtaagtaggaagcagggagcaggggaaagaaaattgacaactgtacaagattaatcgcgtctctgagcaatgaccaaatacatctacctccacggttttcttccagccccctatctgcgaaagcacaagatattagcaagcgtttcgcccaaattcacatacagctaacaatccctgatctcaatgctggtgaattttctcagttaacaatcacgcgccaaattcaacaagttgccgcaattttccctgataattctgaaccaataacgctgataggttctagtttaggcggtttaactgctgcttatctaggacagcgatatttacaagtacaacgcttagttttattagcgccagtttggttttttatcccattggttgcccaaaatgggtgaagaagctgtcacaagttggcaacaaacgatataggttctctcttctgccgtta

SEQ ID NO: 194 - DNA, 6428 bp, Artificial Sequence
  Synthetic Construct- SEQ ID NO: 194, example 194: a designer hox-promoter-controlled F420 systhesis enzymes DNA construct (6428 bp)
agaaaatctggcaccacaccgcagaaatataggggctaggagttgagggtactctggttcgtcaagcatttgggatgatttcccctcacaagttcctcaaattattctcctataaacaatagatataaggtcaaaacttgagttatgagtgctgagtaaaaaattactctccacgcctcagaggtagatatgatgaaagtattgattgatggagaggattttgacagcggcgaccattatgaagtaaaaaacccatatgatggtgagcttgtagatactgttccaatttgttttaggcaagatgtagatagggccatagatgcagcaaatagggctaaaaaggaattgcaggatatgtctgcaaaggaagtgtccaataatctttattctgcttatgaagagctcgaatcaagaagcgaagaattggcaaagcttatagtcttggaggctggaaagccaattaagcaggctattggagagcttaacaggtcttgtgagacattgaagtttgcagcagaggaagccaaaagaatctatggagaatctgtccctatagatgctacaggttctgtagatgagcgttttttggcatttacaaagaaagtacctttaggtgtcgttggagcaataactccattcaattatccggttaatcttgcattgcataagatagctccagccattgcagcaaagaatgctgttgtggtaaagccttccactgaagctccattagctgcacttaaattggttgaaattattgataatcatttcccaaatggggtgataaactctgtaactggctatggaagtgaagttggagatgcattggttgtttcagagggcattgataagatatcatttactggaagcattgccactggattgtttatctcttctcgagcaggaatgaagaaattgactttggagcttggtggaaacgatccattggtcgttcttgaagatgcagatattgaaaaggcagttagtgctgcggtgtccggcgcatttctattctccggacaggtttgcataggtgttaaaagaataatattggataataagattgcagatgagttcattgacttatttgttaaagaggcaagtaaattgaagatgggcaatcctatggatgagtctacagatatcggtccgcttataaatgaaaatgcttcaatcaatgttgaaactgcagtaaacaatgctataaaagatggggcagaacttattttgggtggaaaccgtaaggactgcttctatgagccaacaatattggatggtgtcaatatgtctatggaccttgttgcaaatgaaacattcggaccagttgcacctatcataagggtagatagaatagatgaggcaataaaagtggcaaatgacaccagatacggtcttcaagcaggtgttttcactgaaaatgttcatagtgcattaagatgtgcaaatgagatagatgcaggttcagtcttaatcaataaggaatccactttcagaacagatgccatgccatttgggggattcaaatcaagtggaatgggtaaggaaggaattaaatatgcagttgaggatatgtgcaagtttaaattgattgcttttaattgtaggtgaatgaagacctgcgccataatacctgtttcaaggtttgcacatgcaaagacacggctatcccccacactttcaccgtcagaacgggaggggctgctcagggccatgctgatggatgtttcagaggccctcaggagacacgttgaccgtgtgctggtgatcagtgcagatgcagatgtccttgaatacgcctacagccttggagtcgatatacttgaggagaggggtagaaaggacctcaacggtgccctggaacaggctgctgagttctgcatacccgaatttgagagggtcatgataacaccctcagacatacccctcatagggaaaaccgatatcactgaactcctccacagggcatcccactttgatgttgtgatagcccctgccaagggtggcgggaccaacaccctgatattcaggccagggtccatgaggctgaggtttggtgactgcagcttctttgagcatgtgagtgaagctgagagtaggggtctcagcgtctcagtgtatgactcattctacctttcactggacgttaacacagcagaggacctcggggagataatactccatggagaagggacccatgcaagggagtacctcagaaagctcagtttcatcgtgaggccctcaaggggttctgacaggcttgaggtttcaagatcattctagatgaagataactattctttcaggcggaactggaaccccaaaattaatacagggttttaaagaaattcttccaaacgaagatatttcggttattgtaaacactggtgaagatacttatattggcgacatttacctgtcccctgatattgatactgttttgtacacgttttctaatctgataaatgacgaaacctggtatgggctaaaaggggatacattcttctgccatgaacagcttaaaaattttggatttgacgaagttttgaggattggagataaagatcgggcattaaaaatgcataaaacatctcttttgaaaaaaggagtacctatgtctgaaatcgtagatatcgagagaaaatcattatcaataaactcaaaaatttatccaatgtccgatgaaaaaattgaatccaaagttttaatcgaagaaaacaatgaaaaaatccttttaaagtttcacgatttttgggtgtcaagacgcggaaatgcaaaagttttagatatattctacgaaaactcaaattatgcaaaagcagcagacggagttttaaaagcaattgaggaaagcgattttgtgattattggtccatcaaacccgataacctcaattggacctattttaagcatttctgaaataaaagatgcattaaaagaaaagctggtttttgcagtttcgccaatagttggtgaaaatcctgtaagtggacctgctggaacgctgatgcatgcaaaaggctaccctgtgaatgcagttggagtttatgaatattataaagatattgtagatgttttagttttagacaatagtgatattaacaaaaagaaagaaatgaattgtgaagttttatatgctaatacgataatgaagactattgatgataaaataactctcgcaagaaatattctcgactattataaatccagataaatgtcagttcaggtaacgggaatttccggaatcccgctcattcagaaaggcgatgatctcccggcaataatctgcagaaataccacgttcgaagacgaggatatcctttgtatagcatcaacgatcgtttcgaaagcaaaagggtatacccgcgctctcgcagatatcaccccttcgccggatgccctgcggatctccggcctcaccaaagaagacccccggttcatccaggcgatccttgattcatccaccgagatcatccaggagtatccgtttatcctctccgaagtcccctgcggccacgtaggtgtgcgcgccggtgtggacaatagtaatatagaaggcgaaaatatcatcatccttccaaaagacccctcggccgagtgcagagaaatacgtgactcaataaaaaagatcacgggaaagaatgtcggcgtcatcgtgaccgacacctgcggcagggcatttcgccgcggtcagtgcggaaacgctatcggctgggcaggcatgaccgcgatccgtgactttagaggcgaccacgatctgttcggtctggaactcgaaatcacggaagaagcggtcgtcgatgagatcgccgccttctccaacttcattatgggggagagcaacaacgggatcccggccgtgaaattttccggctgcggtacctggaaaggccacgactcgctctacttcaccaaagaagaagacctgatcagaaaggctatgaaacgataattaaacacaatacccctctccgtcagcgtgtttcctgatgatgggctccagcctttccgggtaccagcccattatcacgtacttcgggtacagcgggagccgctcccgcagcttcaggcccatggcttcgagctcgtccagcgtgggccacctgcactccgggttgatgtagtcctcggtgaccggcgagatgccgccgatgtcgcccgcgccagcctccaggaattcgagcaggtgagacgtcaggttaggcggcgcctggagctcgatatcgcccggtagtatctcgcgggccatccttaaaacacttatcatgtcatcaacggtgggcggttccacgctgcccatccgcgtctcgggcttgggcacgaagttctggacgatgacctcctggatatggccgtactttttatgtatatcccggatggcctcaagggactggcggcggtcgtcccaggtctcccctatgccgaccaggatgccggtagtgaacggtatgcggagcttccccgcgctctcgatgaacccgaggcggagcgagggctttttcatggggctcagcctgtgggcaggcaggtccgccgtcgtctccagcatgaggcccatgctggcattgacgtcctttagtcgttccagctccccgtatggcagcacgccgccgttcgtgtggggtagtatgccaagctcgatggcgtcgaggcagaggtcgtagacataatcggtgagcgtctcatacccgtacctgttcagctccttaaagaaaaggggatccgacggcgagtccccgtatgtgaaaagcgcctccaggcagcccaggcctgcggccttcttgagcatggcgtgggcgatctcgggccggatgacgaaggcctcacgcgatccgacgtcccgccggaacccgcagtagccgcagttgttcctgcacatgttcgtgaccgggacgaacacgttccgtgaataggtgatgaattctttagacattcagatatgctcgtaaagcgtattcctctccacgggcacccggtcgatggcccgaataagctggatgaactcttcctttgagaggtactcgccgtgctcggagccgccggctatggagatcttgtcctcgatcatggtgccgccgaagtcgttggccccggcgcagagggcggcctgcgatagtttgacgcccatcttgatccaggagacctggatgttggggatgtcctgtccgaagatgacccgggccagcgcgtgcaggcgcaggtcgtccatgccgctcacgcctttagactggccgctgagccggttgttctcgtgcatgaaggtgagaggtatgaactcggtgaagccgtgagtctcgcgctggatgtcccttagaaggaacatgtggtcgatgcggtcctcccaggtctccagggtgccatacatgatggtggacgtggtccttatgcccagacggtgggcgtccttgatgatgtcgacccactctcgcgttgacacctttctgggacagatcttttcccggaccgagtcgaccaggatctcggccgaggccccggtgatcgtgttcagccccgccttcttgaaggcggccatggcctctgccggagtgacgcccgacactttcgccgcatagtggacctccatcggggacagggcgtggatcatgatatcgtacttcgacttgatggcttcgaagaggtcgcagtagtactccacggtcatgtagggcatgacacctgagatgaggcacagctcggtggcgccgatatcctttgcctcgccgaccctctgcaggacatcatcggtgctgagcttaaagccgatgttgttcctgaaggagcagaagtcgcacccgatcatgcaccggtcggtgatctcgacgagccggttcacgacgtaggtgatctcatcgccggcgatcgtctttcgcagctcgttcgccgtgtcgaagagctcgaatgggttggctttcacgagctcaagcgcgtccttcttcgtgatatcccctgcgagcgagcgctcatagatgtcctttagcattgaagtaagtaggaagcagggagcaggggaaagaaaattgacaactgtacaagattaatcgcgtctctgagcaatgaccaaatacatctacctccacggttttcttccagccccctatctgcgaaagcacaagatattagcaagcgtttcgcccaaattcacatacagctaacaatccctgatctcaatgctggtgaattttctcagttaacaatcacgcgccaaattcaacaagttgccgcaattttccctgataattctgaaccaataacgctgataggttctagtttaggcggtttaactgctgcttatctaggacagcgatatttacaagtacaacgcttagttttattagcgccagtttggttttttatcccattggttgcccaaaatgggtgaagaagctgtcacaagttggcaacaaacgatataggttctctcttctgccgtta

SEQ ID NO: 195 - DNA, 1778 bp, Artificial Sequence
  Synthetic Construct- SEQ ID NO: 195, example 195: a designer hox-promoter-controlled Pyridoxal phosphate-dependent L-tyrosine decarboxylase(mfnA for methanofuran synthesis) DNA construct (1778 bp)
agaaaatctggcaccacaccgcagaaatataggggctaggagttgagggtactctggttcgtcaagcatttgggatgatttcccctcacaagttcctcaaattattctcctataaacaatagatataaggtcaaaacttgagttatgagtgctgagtaaaaaattactctccacgcctcagaggtagatatgttgagggagcatggggtcgacgaagatacgataatacgggagctaaagggcgcctgtgcgaggaacgtcccgtacgagcgcgtgctcagctccatgtgcacgaccccgcatcccatcgccattaaagcccataaagagttcatcgtctctaacctgggcgaccccaggctttttccgggtacggcctcgctcgagcatgcctgtatcggcatgctgggcgagcttttgcatttgccatccgccgtgggctatatcactaccgggggcaccgagagcaatattcaggcccttcgtacggcccgtcagttaaaacacgtcgacccgggcaaggccaacatcgtgctgcccgagtccgcacattattcgtttgataaggcggcccagatgctgggcgtatccctccggcgcacaccgcttgacgacgaaatgaaagccgacatggacgccatggccggcctcgtcgataaaaacaccatcgccctcgtggccgtcgccggcaccacggagttcgggcaggtcgaccccataccggccatcagtaagctggcgctcgatgagaacatctttttacacgtcgacgccgccttcggcggcttcgtcataccgttcatgaaagacccgtcgaagtacaggttcgacttcgagctccccggcgtcatgtccatcgccatcgacccccacaagatgggcatgagcacgataccctccggagggctgctttaccgggacgagcgccacatgaagtcgcttgagatcagcgcccagtaccttacttcccaggtccagtcgtcccttgccggcacccgcaccggcgcctccgctgcggcgacctatgcggtcatgcgccacctggggatggacggctaccgccgggtcgtgtcagagtgcatggataacaccatgttcctccgggacagcctggtcgacatggacattgagctggccctcgagcccattatgaacatagtgacggcgaagctgcccgatgcgcagtcgacccgcaagaagctctgcgacatgggctggttcgtctccacgacgtcgaggcccgaagcgctccgcatggtcgtcatgccccacgtcaccagggacgtcatcgaggcgttcatggccgacctcaaaaaaatatcgtagtgaagtaagtaggaagcagggagcaggggaaagaaaattgacaactgtacaagattaatcgcgtctctgagcaatgaccaaatacatctacctccacggttttcttccagccccctatctgcgaaagcacaagatattagcaagcgtttcgcccaaattcacatacagctaacaatccctgatctcaatgctggtgaattttctcagttaacaatcacgcgccaaattcaacaagttgccgcaattttccctgataattctgaaccaataacgctgataggttctagtttaggcggtttaactgctgcttatctaggacagcgatatttacaagtacaacgcttagttttattagcgccagtttggttttttatcccattggttgcccaaaatgggtgaagaagctgtcacaagttggcaacaaacgatataggttctctcttctgccgtta

SEQ ID NO: 196 - DNA, 3215 bp, Artificial Sequence
  Synthetic Construct- SEQ ID NO: 196, example 196: a designer hox-promoter-controlled Methanopterin synthesis enzymes DNA construct (3215 bp)
agaaaatctggcaccacaccgcagaaatataggggctaggagttgagggtactctggttcgtcaagcatttgggatgatttcccctcacaagttcctcaaattattctcctataaacaatagatataaggtcaaaacttgagttatgagtgctgagtaaaaaattactctccacgcctcagaggtagatatgatgacagtttcagaatttccagatactcaggataaacaaccatccattccaatatcactaacaagagttggagtaacaggtgtaaagaaattaataaaaataaaaagagaagataaacgtcctattattctaataccaacatttgatgcttttgtagatttacctagtactcagaaaggagtacacatgtctagaaatccagaagctatatctgaaattgttgatgaggctgcaaatcaatcggaaattcatcttgaaaatatatgtgcaaatcttgtaaaaagattacttgaaaaacatgaatatgcattacatgcagaaacagaggcaaggggagaatatattataaataaattatctccagtatctaaaagaaaaacacaggaaacaacacatatcatagcaagagcaattgctatgaaagatgatgagggtaatatttctgttagaaaaatgattggtgcagaagttattggaatgactgtatgtccatgtgcacaagaatctgttgaaaaggattctaaagataaattactggaatttttagatgaagaaactacacaaaaagtgttggatgtagtaacatttgcttctcataatcaaaggggtgttgggacaatacttcttgaagtaccagaaaaacaagatgttaatgtggatgatttaataaaaataatacaggatgctatgagttctcctgtttgtgaaatattaaaacgtccagatgaaaatagaattgtaacaaatgcacatcaaaatccagtatttgttgaggattgtgtaagaaacatggtaataggattacttgaaaaatatcctaatttacctgatgattctgtagttacaattaaacaagtaaatcaagaaagtattcatcaacataatgcttatgctgaaaaagttgcatcttttggtaaattacgagaagaaaataaggagtagatgaatgatctgatcgctcttgcagaggatattaagaacgaaaaattaaaaaaaaaggttgtcgaatttataaacgatccgattccaaaacatcctgaaattgaaagtactggcataacacttgaaacctcccccgcaagcgttaaaagacatcacaaatactccggaggattaatcgaacatacgatcgcagttacaaaaatggctgtaaaaatggctgaagccttggaagaaacatatggaattgaattaaatagagatttgctaatttccggaggaatactccacgatcttatgaaaccacaaaattatcagttaaaagacggaaaattcgaccatctttcaaattttcacctcgaccatttgacacttggaattgcagaactgtacagaagggactttccacttgaagttataaaagttgtagctagccatcacggagatcatggtcctgtaagtccagattcaatagaagcgtggctaattcatcattcagacaatgtagacgctgcaattaatgatataggaattagaatatgtcaggcgagagctagagaatttggaattgatgattcacaaatatataaaatcgtcaatccattaaaattatatgaaatgcgtaaaaaattgggaaaagataaagtgaaagaatttttaaaggaaaaattggaaataaaggatgaataattgttaaggatacgaacaccttcccgcctccacatgacgctcatcgacatgaacggagagatcggcaggatcgacggcgggatcggaataacgctcgacaagccttatatcgagatcacggcgaaaaagagcgatacggtcacggttaagggagaccctgacctgcgcgagcgcatgcgcaaggcatgcgaggcattcggcccgggatatggcgtggagatcgacattaaaaagtcgtactggaaccatatcggcctcggatcgggtacccaggccgctctggccgcgggcaccgccgtagcaaaattgtatggcctggatatgtcgtccgccgaggttgcccttaaagtcggccgcggcggcctgtcgggcgtgggcatcggcgccttcgataaaggcggtttcatcctcgacgggggacataagacgagcgttaagaaggccttccttcccgattcattcgccgacggagtccctcccgccccgctgatcatgagctgccccttccctgactgggacatcgtgctcgccacgctgccgatgaaaggcgcccacgacctttacgaaaaggacgtcttcgcccgaacgtgtcccttaccattaagggagatcgagaggctcagccacatcattctcatgcagatgctgccctcgatcgtagaaaaggacctggaagcctttggcacggcgctgaacgcgatccagggcgtagggttcaagaagagggaagtcgaccttcagccgggcgcctgcgagatattgcgtgtcatgacggaagccggggcgccgggagcgggcatgagctcgttcggcccgaccgtgttcgctgtcactgacaggtccggcccgatcatgtccgaggtcaagagtaactgccctgattgtatggtcatgaagacaagggcccgtaattcgggggcagatatcgaatgcctcccgtagtgaagtaagtaggaagcagggagcaggggaaagaaaattgacaactgtacaagattaatcgcgtctctgagcaatgaccaaatacatctacctccacggttttcttccagccccctatctgcgaaagcacaagatattagcaagcgtttcgcccaaattcacatacagctaacaatccctgatctcaatgctggtgaattttctcagttaacaatcacgcgccaaattcaacaagttgccgcaattttccctgataattctgaaccaataacgctgataggttctagtttaggcggtttaactgctgcttatctaggacagcgatatttacaagtacaacgcttagttttattagcgccagtttggttttttatcccattggttgcccaaaatgggtgaagaagctgtcacaagttggcaacaaacgatataggttctctcttctgccgtta

SEQ ID NO: 197 - DNA, 4226 bp, Artificial Sequence
  Synthetic Construct- SEQ ID NO: 197, example 197: a designer hox-promoter-controlled Coenzyme M synthesis enzymes DNA construct (4226 bp)
agaaaatctggcaccacaccgcagaaatataggggctaggagttgagggtactctggttcgtcaagcatttgggatgatttcccctcacaagttcctcaaattattctcctataaacaatagatataaggtcaaaacttgagttatgagtgctgagtaaaaaattactctccacgcctcagaggtagatatgttaaagattcacctttccgagagtatctcccctcaagcctcttcttatggtttcaagggctgttatctcttcggggggtatgtttccaaggttaacgtctggtcctattttcagtatgaagtaaacctgctggtttttctggggggcctcccatattatcctatcctgcgggagttcattgaggaggtggttgaattcttcctcctttacgtttccattctcatcgtatatacctatattatggccgctctcccgggcctccatgagcaccatgcaggctccagctttgaggtcggccctgacaagttcaaccctatcctccgggctgagaagtctgtcccttaccgggtcctttttaccaacctctgatatgatctggaacccctcgttgaccgctttctctataagttcacatttttcatcggtttcaatctcaacggttccatttgatatttccagtgtttcaaaaccaaggcttcttgcctcgtcaaagtactcctgaattttatcgttgagataggcgatctcaaatagggtgcccccaggataggcctccacatcgaatgaacggtacatctcaattttttccatgacagcgtcacgtctgtggagggggagggttccccatccaaactttatgaaatcaacgtaatctgatgaaatctccatgaggtcacgggctgttttaatgcccattcccttatcgagaaccatggttattccattttttctgggtttcccacgccttggaggtgtgagaaagtcaaaggcgttcatatgagggtaagtctcagctttgaaaaaccggagggcagtggactctgcataatggtggaccttctgagggcaagtgcaaccataacctctgccctggacagtttcagggaggtcatccctgttggggacgttgaggaggcaacggaatactccaggatgggctatgtggtggcaggggagcgtggtggtgagaccctgccaggattcctggccaactccccactggaggtgagggaacattcaggtgatgcccttgtgctaaccaccagtaacggtacaaggatccttgagtcagttgaatcacaggccctcgtgggctgcctcaacaatctggatgcagtggcctcagctgcaaggaatctttcggatgaagttgaggtggtcatggccggtgttaatggccgctttgcaatagaggatttcctctgcgccggtgaaataatacgtgccattggtggtgagtttgaagagtacgctgaggcctcagtacttgcagttcaggacaggtccatggttgatgatgccataagaaaatccaggtcagccaggaggctcagggaacttggttttgccggtgatattgaatactgcctcagaaggaatataacagaaaacgtacccgtatacagggacggcaggatatcgctgatctaaatgaggataagtgctgaagaggaagttagaatcataaaggaaatactcaccgccatggaggttccagaggaggtttcagagatagtggctgatgttaccctggacgcggacctgaagggtttcagttcacatggaatcggtcgtttcccccagtacgttgaggggctgcgatgtgggacaataaagccccatggtgacataaccattgaaagggaaaccccctcaacggccctcataaacggtaaccacatgttcggacactttgttgcctgcagggcaatggaacttgcaattgaaaaggccagggataccggcgtcgggcttgttggtgtccatgactcaaaccactttggtgttgccggatactactcggacatggcggtcatgaacgacatgataggggttgtgatagcaaatacagagcctgctgtggcacccataggtggcaaaacacccatcctgggaacaaaccccgtggccatagggatcccatcaaacaggcactatgtctcggttgacatggcaacctcagcatccgccaggggcaaactcctggaggccgccaggaagggtgagagtatacccgaaaacatagcaatggacgccgatggaaaccccacaaccgaccctgaacttgcccttaaggggtccatactccccttcggtgggcataagggttatgcgctttcattcatgatagagatcctagcaggtccccttgtgggggctgcctttggggctgcggtgaagggaaccgcgaacccccgggagatgtgcaccaagggcgacctcatgatggccatagacccctcaaagatggtcgacctccaggaattcaaatccagcgtggatgaattcatcgaggaggttaaatcatccggggacgtcctcatacccggtgacattgaggccatgaacataaagagggggcgtgaagagggaatagaggtggatgaaaagctccttcaaaggctgaatgaaatatcagatgaactcggcctggacctcaagattaaggggttatgaatggcaaacgttgagcaagaagtcatagacatcatgaagtcctccggcatcgacacagtgctgacgctgccgtgcgataaaataaagaatttactggcgatggtcccctcgaactttaaggagatccccctgaccagggaggagaacggcatcggtatcgcggccgggctttccatggccggcaaaaggccggccctcattatccagagcacgggaataggcaactcgctgaacgtgctctcatcgctgaacaggacttatgagatacccctgcccatcctggccagctggaggggctactataaggaagccatctatgcccagacggccttcggcaagtgcctgcccgccatacttgaagcctctgacatacagcacatcgagatcggcgccatgggcgagctcgacctgatcaagaaggccatcatcgcctcgttcaagtcgaacttgccgaccgtgatactcttatcgcccaggctgtgggagatctcgacggagaggcactggaacccggacttcacgccccgggaaaggcgttttgatatggagtgccacaccgttgtcccgaaggccacgcatacccgctacgacatgatcaagggcatcacttcataccttagcggcaaagtcgtggtctccaacatcggcatcccgagcaaggagctctatgccgcccacgaccaggacacgaacttctacatgacgggcagcctgggccttgtttccgctatcggccagggcctggccatgggcctgagccgggaggtcatcacgctggacggcgacggcagtattttaatgaacccgaacgtgctggcgagcgtcgcccaggaaaagcccgagaacctcaccatcatttgcttcgataacagcgcccacggctccactggcaaccagaagacctattcggagagcatggacctcgagcttctggcgaaggcgttcggcatcgagaacacggcgaaggcatctacacccggagagctgcttgaggcgctggagaaaagggggaaagggccccggttcatccacgcgatcatcgaggcgaagaacgccgacgtgccgaatattcctttgacaccggtagagatcaaggagcggtttatgggggcggtcacgcgctgatgaagtaagtaggaagcagggagcaggggaaagaaaattgacaactgtacaagattaatcgcgtctctgagcaatgaccaaatacatctacctccacggttttcttccagccccctatctgcgaaagcacaagatattagcaagcgtttcgcccaaattcacatacagctaacaatccctgatctcaatgctggtgaattttctcagttaacaatcacgcgccaaattcaacaagttgccgcaattttccctgataattctgaaccaataacgctgataggttctagtttaggcggtttaactgctgcttatctaggacagcgatatttacaagtacaacgcttagttttattagcgccagtttggttttttatcccattggttgcccaaaatgggtgaagaagctgtcacaagttggcaacaaacgatataggttctctcttctgccgtta

SEQ ID NO: 198 - DNA, 5198 bp, Artificial Sequence
  Synthetic Construct- SEQ ID NO: 198, example 198: a designer hox-promoter-controlled Coenzyme B synthesis enzymes DNA construct (5198 bp)
agaaaatctggcaccacaccgcagaaatataggggctaggagttgagggtactctggttcgtcaagcatttgggatgatttcccctcacaagttcctcaaattattctcctataaacaatagatataaggtcaaaacttgagttatgagtgctgagtaaaaaattactctccacgcctcagaggtagatatgttgcccgatcgggtacggatcttcgacacgacgctaagagacggtgagcagacaccgggcgtcagcctcacggtggaggaaaaggtcgagatcgcgaggaagttggacgagttcggcgtggataccatcgaagcgggcttccccgtagccagtgagggtgagttcgaggcagtgagggcgatagcaggcgaggaactggacgcggagatatgcgggttggccaggtgcgtgaagggggacatagacgcggcgatcgacgccgacgtggactgcgtgcacgtgttcatagccacgtcggacatccacctcagatacaagttggagatgtcccgggaagaggcattggagcgtgccatagagggcgtggagtatgccagtgaccacggagtcaccgtggagttctccgcggaggacgccacacggacggaccgggactacctactcgaggtctataaagctaccgtggaagccggcgcggatcgtgtcaacgtcccggatactgtgggagttatgacccctcccgagatgtatcgactgacggcggaagttgtcgacgccgtagacgtgccggtcagcgtgcactgccacaacgacttcggcatggccgtggccaactcattggccgccgtcgaagccggggctgaacaggttcatgtgaccgtgaacgggatcggcgagcgtgccggtaacgcctcgctggaacaggtcgtaatggccctcaaagcgctgtacgatatcgagttggacgtgaggaccgagatgctcgtcgagctctcacggctcgtggagcgactgacgggcgtcgtagtaccgccgaacaccccgatagtcggcgagaacgccttcgcccacgagtcggggattcactcccacggcgtgatcaagaaggcggagacgtacgaacctatacggcccgaggacgtcggtcatagacggcgtatagtactaggtaagcacgccggtcggcacgcgatcaagaagaagctcgaggagatggggatcgaggtcacggaggaacaactcgacgagatcgttcggcgcgtcaaggagctcggggataagggcaagcgcgtcaccgaagacgatcttgaagccatagcccgagacgtcgtcggcgaggtacccgagtccgaagctgcggtcaagctggaagagatcgccgtgatgaccgggaacaaattcacgccgacggcgtcggtccgtgtgtacctggacggtgaagagcacgaagcggcatcgaccggtgtgggctccgttgacgcggcgatacgggcactgcgcgaagcgatcgaggagctcggtatggacgtggagctgaaggagtaccgcctagaggccatcaccgggggcaccgacgccctcgccgaggtcacggtgaggttggaggacgaggacgggaacgtcaccacggcccgcggtgccgccgaggatatcgtgatggccagcgtgaaggcgttcgttcggggcgtgaatcggctggcacgtcgacgtagggactaagtgaacgcgtcgccgaccgtcgtggtaatccccggggacgggatcgggccggaagtcatcgacgcggccctgaaggtcgtgcgggcggttctgggtgacgaactcgagatcgtggaggaacaggccgggtactcgctgtggaagaagaggggagtcacgatcgaggacgagacgatcgagcgctgccgcgaggcggacgccatgctcttcggcgcgtgcacgactccggaggacccggaggccaagagtcccatcgtgacgctgcggaaagagctcggactctacgccaacgtccgtcccgctcgctcctggcccgtaccgcgacctgtcgacaccgagttcgacctggtgatcgtccgggagaacaccgagggtctctacaccggatgcgagtgcgagatccacgacggtgttaccgtcgccctgcgtaagatctccgaggagggtacgcgcagggtcgctgaggtcgcctgcgatctcgccgaggagcgctccggtcgcgtgacgatagtgcacaaggccaacgtgctgaagctcacgtgcggaacgttcaagcgcgtcgcggcggaaaccgtggagcgtcgcggtctggagtgggacgacgagtacgtggacgcggcggcgtacaagctggtgcgtgagccggacagcttcgacgtgatcctcacctccaacctgttcggggacatactctcggacctggcggcgggtctgatggggagcctcgggctcgcacccagcgcgaacctgggggacgacgccgccctattcgagcctgtacacgggtcggcacccgacatcgcgggtaaggggatcgcgaacccggtggcggcgatcctctcggccgccatgatgctggatcacctcgggtacggggaggaggctcggatcatcgagcgtgccgtcgaggaggtgctgcgcgagggcgtgaggactcccgacctcggcggttccgcgaccacggaggaggtggccgaggcgatcgcggagcgtgtggctaccgggtgactatacctccctcacatcggtgatttcgcccgccaacgcagccgcagcggccatcagcggactcatcagatgagtccgaccacccttgccctgcctgccttcaaagttcctgttagaagtggaggcacagcgctcgccagggttaagccgatcatcattcataccgaggcacattgagcatcccgccgcccgccactcgaaaccagcatttcgaaaaatcatatccagaccttcccgctctgcctgcaggcgaacctggccagaccctggaacaatcagagcctgtttcaccgaccggtgcactttctgtccctgcaccagattagcgacggctctcaagtcctccatgcgggcattggtgcaagaaccaatgaaaaccttgtcgattgacaaccccttcagggggcgcccgggctcaagccccatgtagtccagagcccgcctggccgattcccgcttctccggcgccagctgagaaagatccggggttttgccatcaataccggtgaccatctctggggatgtgccccaggttacctgcggcaccagggcttccagcggaaaatgctcctcgcgatcaaaatctgcctccgcatccgaaaccaacgtgcgccaatactcacgagcctgctccaggcgctcgccaactggcgcctggggtctgccctccacgtattgttccgtcacccggtcataagcaaccatgcctgcccgggcaccggcttcaatgctcatgttgcagatggtcatgcgcccctccatggacaggttacgaatggctgcaccggcgtattcaatggcatatccgttgccgccagcggtccctatacgcccaatcagcgccagaatcaggtcttttggggtcaccccgaaacctggctgaccttcgaacaccactcgcatgtttttctgtttctgggtccgcagggtctgggtggccagcacatgctccacctcgctggtaccgattcccatggcgagcgtcgcgaaagcgccgtgagtggaggtatgagagtcgccgcaaacgatggtcatgcccggcaaggtcaggccctgctccggacccaccacgtgtacgatcccttgccgggcatcttccagttcaatcaacggaataccgaattcctcgcaattacgcgacagggtttccacctgttttcgcgcaacacggtcggcaatacctgcgacgccgagttcccgtttccgggttggtacggcatgatcgggcaccgctacattggccggaattcgccagggctttcgaccagccgagcgcagaccggaaaaagcctggggcgtggtcacttcgtgcagcaaatgacggtcgatgtagagcaacgcggaaccgtcaggcagttcatccaccaggtggcgctgccagagtttgtcgtagagcgtacgcgcagccatctactcaaaaagccagggttccagggttcttcggttcgcctcgtaggcctgaatggagcctgaaaaagtcagggtacgacctatctcatccagaccgctgaggaggttctcccgccgacccgactcaaccacgaaacgccaggtcttcttcggactgcgaatctcgcattgctccaaatccaccgtcagttccagaccgtccgtgtcactggccaaattgaacaattcgtcaatggttgactcgtcgagtattaccggaagcaggccattgttaaagcagttgttaaagaaaatatccccaaaactgctggcaataaccgctcgaacgccaaagtccttcagggcccagaccgcgtgttcccgggatgacccacagccaaagtttgccctggccagcaggatggaagcacggtcgtagggcgcccggttcagaatgaagtcgggatccggtctgcgctccgacacggggatgtccacatcaccggggtccagatatcgctcatcatcaaagaggaagtctgcaaacccggttttctccagcattttaagatactgcttgggcagaattgcgtcggtgtccacattcgaccggtcgaaaggaacgaccagaccggtgtgtgttttgaatgcctccattgaagtaagtaggaagcagggagcaggggaaagaaaattgacaactgtacaagattaatcgcgtctctgagcaatgaccaaatacatctacctccacggttttcttccagccccctatctgcgaaagcacaagatattagcaagcgtttcgcccaaattcacatacagctaacaatccctgatctcaatgctggtgaattttctcagttaacaatcacgcgccaaattcaacaagttgccgcaattttccctgataattctgaaccaataacgctgataggttctagtttaggcggtttaactgctgcttatctaggacagcgatatttacaagtacaacgcttagttttattagcgccagtttggttttttatcccattggttgcccaaaatgggtgaagaagctgtcacaagttggcaacaaacgatataggttctctcttctgccgtta

SEQ ID NO: 199 - DNA, 1636 bp, Artificial Sequence
  SEQ ID NO: 199 presents example 199 of a designer Synechocystis sp. strain PCC 6803 nirA-promoter-controlled NAD-dependent formate dehydrogenase DNA construct (1636 bp)
agaaaatctggcaccacaccctaaatgcgtaaactgcatatgccttggctgagtgtaatttacgttacaaattttaacgaaacgggaaccctatattgatctctacatgatgaaaatcgttctcgttttgtactccgctggtaagcacgccgccgatgaaccaaagttgtatggttgtatcgaaaatgaattgggtattagacaatggcttgagaagggcggccatgaattggttactacatcagacaaagagggtgaaaactctgagttagaaaagcacattcctgacgctgatgtgattatttccactccattccatccagcctacatcacgaaggagagaatccaaaaagccaagaagctgaagttgttggtcgttgctggtgtcggttccgaccacattgacttggactacattgaacaaaatggcctagatatttcggtcctagaggttactggttccaacgttgtttcagtggctgagcatgtcgttatgactatattgaacttggtgagaaactttgttccagctcacgagcaaattgttaaccacggctgggacgttgctgccatcgccaaggacgcctacgatatcgaaggtaagaccatcgcaacaattggtgctggaagaattggttacagagtcttagagagacttgtggctttcaaccctaaggaattgttgtactacgactaccaaggtcttccaaaagaggccgaggaaaaagttggtgccagaagagtcgacactgtcgaggagctggttgctcaagccgatgttgttaccgtcaatgccccactgcacgcaggtactaagggtttagttaacaaggagcttctgtccaagttcaagaagggtgcttggttggttaacacagccagaggtgccatctgcaatgctcaagatgtcgctgatgccgttgcatctggtcaattgagaggttacggtggtgacgtctggttccctcagccagctccaaaggaccatccatggagagatatgagaaacaagtacggatacggaaacgccatgactcctcattactcaggtaccactttggacgcccaggtcagatatgccgaaggtaccaagaacatcttgaactcattccttaccaagaagtttgactacagacctcaagatgtcattcttttgaacggtaagtacaagaccaaggcttatggtaatgacaaaaaggtcgcataatagtaatgagttacagttttggcaattactaaaaaactgacttcaattcaatgttagcccgctcccgcgggttttttgttgctttttcacagtgactataggtaatcagcaacacaatacggccctgttctttggacagtttttgtataatgttgaccgcatcctgaccggattttttatctaagtggggaattgtcaattgtcaattaaagctaagttctactaatgttttagaaggcattgtcgattgaaaataagggttgaatggagaaaattttgagcctttgtcaaagataaaaatttatttcaacagttttttaactagccgaaccagagaatgacccagtggcgctgactttgctcccgagtttttgttagaaattaccctcaagaagtaatctaataataaggttctctcttctgccgtta

SEQ ID NO: 200 - DNA, 1567 bp, Artificial Sequence
  SEQ ID NO: 200 presents example 200 of a designer Synechocystis sp. PCC 6803 nirA-promoter-controlled Formaldehyde dehydrogenase DNA construct (1567 bp)
agaaaatctggcaccacaccctaaatgcgtaaactgcatatgccttggctgagtgtaatttacgttacaaattttaacgaaacgggaaccctatattgatctctacatggtggacatcgtcgtcccggatcccgggcccggcgaagccgtcgtcgatatcagcgcttgcggcgtttgtcacaccgatctgacctaccgcgagggcggcatcaacgacgagtacccgttcctgttgggccacgaggccgcgggcacggtcgaagcggttgggcccggggtaaccaacgtggagccaggcgatttcgtgatcctgaactggcgtgcggtgtgcggccagtgccgggcctgcaaacggggccggccgagctactgtttcgacacgttcaacgccgagcagaagatgacactgaccgacggcaccgaactcaccccggcactgggcatcggggcattcgccgacaagacgctggtgcactccggccaatgcaccaaggttgatcccgcggccgaccccgccgtggcgggcctgttgggttgcggggtgatggccggactgggcgccgcggtcaacaccggtggcgtcacccgcgatgacaccgtcgcggtgatcggttgtggcggcgtgggtgatgccgccatcgccggtgcggcgctggtcggagccaagaagatcatcgccgtcgacaccgacaacaccaaactggagtgggcgcgcgccttcggcgccacccacaccctcaacgcccgcgaactcgacgtcgtcgaaacgatccaggacctcaccggcggctttggggtcgacgtggtgatcgacgcggtcggccggcccgaaacctggaagcaggcgttctacgctcgtgatctggccggaaccgttgtcctggtgggggttcccacccccgacatgcggctggacatgccgctggtggacttcttctcccgcggtggcgcgttgaagtcgtcctggtacggcgattgcctacccgagcgcgacttccccaccctgatcgacctctacctgcagggccggcttccgctggacaagttcgtttccgagcagatcggtctgggcggtatcgaggaggcattcgagaagatgcacgccggcaaggtgctgcgctcggtggtggtgttgtagtagtaatgagttacagttttggcaattactaaaaaactgacttcaattcaatgttagcccgctcccgcgggttttttgttgctttttcacagtgactataggtaatcagcaacacaatacggccctgttctttggacagtttttgtataatgttgaccgcatcctgaccggattttttatctaagtggggaattgtcaattgtcaattaaagctaagttctactaatgttttagaaggcattgtcgattgaaaataagggttgaatggagaaaattttgagcctttgtcaaagataaaaatttatttcaacagttttttaactagccgaaccagagaatgacccagtggcgctgactttgctcccgagtttttgttagaaattaccctcaagaagtaatctaataataaggttctctcttctgccgtta

SEQ ID NO: 201 - DNA, 1549 bp, Artificial Sequence
  SEQ ID NO: 201 presents example 201 of a designer Synechocystis sp. PCC 6803 nirA-promoter-controlled NAD(P)H-dependent Alcohol dehydrogenase DNA construct (1549 bp)
agaaaatctggcaccacaccctaaatgcgtaaactgcatatgccttggctgagtgtaatttacgttacaaattttaacgaaacgggaaccctatattgatctctacatgatgaaaggtaaatctattgtcgttgagtctggcggtggttttgagcgtgtcagagtcagtgatgccgaggcgcaagcgcctaaagcgggggaagttctggtcaggatacatgccaattcactgaattatcatgattatgctgttgttaaagggttatggcctgcatctgaaaacagaataccaatggctgatggcgcaggtgaagtgattgaggttggcccaaatgtaactgaatttgcagtgggtgacagcgtcgtgagtacgtttttcccttcctgggtaaacggtgcccccatcgttgacggtttctcaacggttccgggcgatggcgtagatggttatgcaagagaatatgtgactgccagtgctgaggctttcacaaagtcgcccacaggatggtctcacaccgaagcggcgactttgaccacagctgcggtgacagcttggcgagctttgtttgattttaatccacttaaacccggtgaaacggtgcttttgcaaggtacgggtggagtctctattttcgctttacaatttgccaaaatggctggcgccaaagtgatcgtcacttcctccagtgagcaaaaactcgcaaggctcaaggagatgggagctgatcatgtgatcaactacaaaaaagaacctaaatggggctttttagccagagaacttaatgatggaaaaggggttgatcacgtcgtcgagattggaggcgctgaaacactagagcagtctctcaacgcgatacgtgtcgctggccaaatttcactaatcggtatcctgtctggacaaacttgcgatataaatattgtgaagtcttttgtgaaacaggcgaggctgcagggtgttcttgttggcagtagagggcatcagcaggagatgattagagctatcgaggttaataagctcaagccgattattgatcgtacgtttgctttgcacgagattgttcaggcatttgagtatcaagagacgaatcagcatttcggaaaaatttgtttagagttttaatagtaatgagttacagttttggcaattactaaaaaactgacttcaattcaatgttagcccgctcccgcgggttttttgttgctttttcacagtgactataggtaatcagcaacacaatacggccctgttctttggacagtttttgtataatgttgaccgcatcctgaccggattttttatctaagtggggaattgtcaattgtcaattaaagctaagttctactaatgttttagaaggcattgtcgattgaaaataagggttgaatggagaaaattttgagcctttgtcaaagataaaaatttatttcaacagttttttaactagccgaaccagagaatgacccagtggcgctgactttgctcccgagtttttgttagaaattaccctcaagaagtaatctaataataaggttctctcttctgccgtta

SEQ ID NO: 202 - DNA, 1180 bp, Artificial Sequence
  SEQ ID NO: 202 presents example 202 of a designer Thermosynechococcus elongatus  nirA-promoter-controlled Formate dehydrogenase DNA construct (1180 bp)
agaaaatctggcaccacacctgacccccatcgagagactccgaacgtggcaaatggagggaccagagttgttcagttcacaggtagataatgtcgcgggtcttgatagttagcaataaatacagtttcagaatatctgtaatacaaaaactgtatcgagacaagaaaaaagtagcaaaatttacaaatgttcatgattcatctggctaaattggatgttcaactgacccattgaagacaagggcaacaaccttgaacgataaagtaactgcggtcagggatgtatggcgctatgaacaaggggaaataagcaaagtagaagaccggatggtgacggaattccctttgacagtaatactgaatggcagtgaatttgtgacgctcgtttgtacgcctgagcatatcgaagagcttgtcatcggatttctcgcatcagagggtgttatacgatttcaaaaagaaattaaaaggtttacaatagatgaaagtctcggttttgtatatgtcgacctcgttcaccctgagacattggatcaaaaggattatacgaaacgggtgatcggctcatgctgcggaaagggccgtcatttttattttcagcaggatgtcaaaacagccaagacggctgtcagccaaatcaagatatcgcctgaggcatgtctggcgcttatgaaagacatgcagcaagggagcgggacgtttcaggatacgggaggcgtccataatgcggcgctttgcgacacagagaagcttctgttgatgcgcaccgatatcggtcggcacaacgcacttgataaactatacggacactgccttctaaacgggatgtccgtacgcgacaaactgattgtgtttagcggcagaatctcatcagaggtcctgttaaaagcggccaaaatcggcgtgtcgattgtcatttccaaatcggccccgacggagcttgcgattcaaatggctgaagaattgaatatcacagcgattggatttgtcagaaacggatcatttaatgtatatacacaccctgagagaatcagggagtagtaaggctgagatcttcttcagtgcattgtagttgaatgaagggttaggggggaaatgcccccctattttttgtctagccatcctgccacgtttgacagggtagcaatttcgacacgatagggttctctcttctgccgtta

SEQ ID NO: 203 - DNA, 1432 bp, Artificial Sequence
  SEQ ID NO: 203 presents example 203 of a designer Thermosynechococcus elongatus  nirA-promoter-controlled formaldehyde dehydrogenase DNA construct (1432 bp)
agaaaatctggcaccacacctgacccccatcgagagactccgaacgtggcaaatggagggaccagagttgttcagttcacaggtagataatgtcgcgggtcttgatagttagcaataaatacagtttcagaatatctgtaatacaaaaactgtatcgagacaagaaaaaagtagcaaaatttacaaatgttcatgattcatctggctaaattggatgttcaactgacccattgaagacaagggcaacaaccatgaaagcacttacatacctagggccaggaaaaaaagaattaatggaaaaaccaaagccaaaaattgaaaaggaaaccgatgcaatcgtcaaaataataaaaacaacgatttgtggaacggatttgcacattctttcaggagatgttcctactgttgaagaagggcggattttaggacacgaaggcgtcggaattattgaagaagttggttcggccgtaaagaattttaaaaaaggcgacagagtgttgatttcttgcattacctcttgtggaaaatgcgaaaattgcaagaaagggttatacgcccattgcgaagatggcggctggatcttaggccacttaattgatggaactcaagcagaatatgtaagaattccgcacgcagacaacagcctttatcctattccggaaggcgtggatgaagaggctcttgtcatgcttagtgacattcttccaacaggatttgaaatcggcgtgttgaacggcaaagttcagcctggacaaaccgtcgccattatcggagctggtcccgtaggtatggcagcgctattaacagcccaattttattcaccagcagagatcattatggttgatttagacgataaccgtttagaagttgcgaaaaaatttggcgcgacccaagtggtgaatagcgctgatggcaaggcagtggaaaaaattatggaattaaccggcgggaaaggtgtagacgtcgcgatggaagccgtcggaattccggcaacatttgatatttgtcaagaaattgtcaaaccaggtggctatatcgccaatatcggtgttcatggaaaaagcgtggaatttcacattgaaaaattatggatacgcaacattacgttgacaaccggtcttgtcaacacgacttctacgccgatgttattaaaaacggtgcagtcgaaaaaattgaagccggaacaattaattacccatcgtttcgccttttcagacattatgaaagcgtatgaagtatttggaaatgcagcaaaagaaaaagcgttaaaagtcattatttccaacagttaataaggctgagatcttcttcagtgcattgtagttgaatgaagggttaggggggaaatgcccccctattttttgtctagccatcctgccacgtttgacagggtagcaatttcgacacgatagggttctctcttctgccgtta

SEQ ID NO: 204 - DNA, 1579 bp, Artificial Sequence
  SEQ ID NO: 204 presents example 204 of a designer Thermosynechococcus elongatus  nirA-promoter-controlled thermophilic  NADPH-dependent Alcohol Dehydrogenase DNA construct (1579 bp)
agaaaatctggcaccacacctgacccccatcgagagactccgaacgtggcaaatggagggaccagagttgttcagttcacaggtagataatgtcgcgggtcttgatagttagcaataaatacagtttcagaatatctgtaatacaaaaactgtatcgagacaagaaaaaagtagcaaaatttacaaatgttcatgattcatctggctaaattggatgttcaactgacccattgaagacaagggcaacaaccatggcaggttattcgaaatggttcagggttccgcgggatatagtgttcggctggggcagcctggaataccttaaagaactggaaggcaaaagggcctttatagttaccgacaaaaccatgcaggagcttggctttgtggacaaggtgaagagctacctggccgaagccggaattgaaagcgccgtattcaacgaagtagagcccgatccttcccggcaaaccgtgaaaaaaggcgccaggctgatggagcagtttcagccggacctgattgtcgggctgggcggcggctcttccctggacgccggcaagggaatgtggattttctacgaatatccggatgcaaagtgggaagacattttcgttcccttcaccggcgtgccgaagctgagaaacaaggccaggtacgtggccattccttccaccagcggcaccgccaccgaggtaaccctggcggcggttatcaccaaccgcgacgttgtgccgaacgttaaggactttaccctttcctacgaggttacgccggacattgccatctgcgatccggagttgccttccacaatgccacctgccgtcaccgccaacaccggctttgacgtgatcgttcacgccgttgaggcatacgtttctgtaaacgccaccgacgttaccgacccgattgccctgcggtctgccgccatggcttataaatggttgcctctggccttcgccaacggcggaaacaaagaagcaagggaaaaaatgcacacggcctcgctcatggccggctttacctttaccaacaccgccctggggctggtccacagcaccgcccaccagatcggggcggaatacggcgtgccgcacggccgggccaacgcaatcatgctgccgtatgtggtgcagtacaacgccccggcggccgccgcacgttacgccgatatggcccaggccttcgggtatgcttccaccgatccgttcgagggcacggtcaagttcatcgacgccgtccggaagctgcaaaagattctgggcatccctgcctgtctgaaggatgccggcattaaagaagaggacttcctgaagaaagtggacatgctcaccaagaacgccatgaacgacggcagcacgccggccaacccgcgggtcccaaccctggcggaaatcaagaacatcttcctctgcgcctattacggaaacgacgtgatttaataaggctgagatcttcttcagtgcattgtagttgaatgaagggttaggggggaaatgcccccctattttttgtctagccatcctgccacgtttgacagggtagcaatttcgacacgatagggttctctcttctgccgtta

SEQ ID NO: 205 - DNA, 1822 bp, Artificial Sequence
  SEQ ID NO: 205 presents example 205 of a designer Thermosynechococcus elongatus  nirA-promoter-controlled lipase (using butanol) DNA construct (1822 bp)
agaaaatctggcaccacacctgacccccatcgagagactccgaacgtggcaaatggagggaccagagttgttcagttcacaggtagataatgtcgcgggtcttgatagttagcaataaatacagtttcagaatatctgtaatacaaaaactgtatcgagacaagaaaaaagtagcaaaatttacaaatgttcatgattcatctggctaaattggatgttcaactgacccattgaagacaagggcaacaaccatgggtatctttgactataaaaaccttggcaccgagggttccaaaacgttgttcgccgatgccatggcgatcacgttgtattcctatcacaacctggataacggctttgccgtgggctaccagcacaacgggttgggcttggggctaccggccacgctggtcggtgcgctgctcggcagcacggattcccagggcgtgatccctggcatcccgtggaacccggattcagaaaaagccgcccttgaggcggtgcagaaagccggttggacaccgatcagcgccagtgccctgggctacgccggcaaggtcgatgcacgtggcaccttctttggggaaaaagccggctacaccacggcccaggtcgaggtactcggcaaatacgatgacgccggcaagctgctcgaaatcggcatcggttttcgtggcacttcggggccacgggaaaccttgatcagcgactcgatcggcgacttgatcagcgatctgctcgcggccctggggcccaaggattacgcgaaaaactacgccggcgaagccttcggcggcttgctcaagaatgttgccgactacgccggtgcccatggcctgaccggcaaggacgtggtggtcagcggccacagcctgggcgggctggcggtcaacagcatggcggacttgagcaactacaaatgggcggggttctacaaggacgccaactatgttgcctatgcctcgccgacccagagtgccggcgacaaggtgctcaatatcggttacgaaaacgacccggtgttccgcgcgctggacggctcgtcgtttaacctgtcgtcgctgggcgtgcacgacaaaccccacgagtccaccaccgataacatcgtcagcttcaacgaccactacgcctcgacgctgtggaatgtgctgccgttttccatcgtcaacctgcccacctgggtctcgcatttgccgacggcgtacggcgatggcatgacgcgcatcctcgagtccggcttctacgaccagatgacccgtgactccacggtgattgttgccaacctgtccgatccggcgcgggccaacacctgggtgcaggacctcaaccgcaatgccgagccccacaagggcaacacgttcatcatcggcagcgacggcaacgacctgatccagggcggcaacggtgcggactttatcgagggtggcaaaggcaacgacacgatccgcgacaacagcgggcacaacacctttttgttcagcggccactttggcaatgatcgcgtgattggctaccagcccaccgacaaactggtgttcaaggacgtgcaaggaagcaccgacctgcgtgaccacgcgaaggtggtcggcgccgatacggtgcttacgtttggggccgactcggtgacgctggtcggcgtggggcatggcgggctgtggacggagggcgtggtgatcggctgataaggctgagatcttcttcagtgcattgtagttgaatgaagggttaggggggaaatgcccccctattttttgtctagccatcctgccacgtttgacagggtagcaatttcgacacgatagggttctctcttctgccgtta

SEQ ID NO: 206 - DNA, 1486 bp, Artificial Sequence
  SEQ ID NO: 206 presents example 206 of a designer Thermosynechococcus elongates  nirA-promoter-controlled lipase (using ethanol)  DNA construct (1486 bp)
agaaaatctggcaccacacctgacccccatcgagagactccgaacgtggcaaatggagggaccagagttgttcagttcacaggtagataatgtcgcgggtcttgatagttagcaataaatacagtttcagaatatctgtaatacaaaaactgtatcgagacaagaaaaaagtagcaaaatttacaaatgttcatgattcatctggctaaattggatgttcaactgacccattgaagacaagggcaacaaccatggccaggacgatgcgttccagggtggtggcaggggcagtggcatgcgcgatgagcatcgcgccgttcgcggggacgaccgcggtgatgacgctcgcgacgacgcacgcggcaatggcggccaccgcgcccgccgctggctacgcggcgacgcgttacccgatcatcctcgtgcacgggctctcgggtaccgacaagtacgccggcgtgctcgagtattggtacggcatccaggaggacctgcaacagaacggtgcgaccgtctacgtcgcgaacctgtcgggtttccagagcgacgacggcccgaacgggcgcggcgaacagttgctcgcttacgtgaagacggtgctcgcggcgacgggggcgaccaaggtcaatctcgtcggtcacagccagggcggcctctcgtcgcgctatgttgctgccgtcgcgcccgatctcgttgcgtcggtgacgacgatcggcacgccgcatcgcggctccgaattcgccgacttcgtgcaggacgtgctcgcgtacgatccgaccgggctttcgtcatcggtgatcgccgcgttcgtcaatgtgttcgggatcctgacgagcagcagccacaacaccaaccaggacgcgctcgccgcactgcagacgctgaccaccgcacgggccgccacgtacaaccagaactatccgagcgcgggcctgggtgcgccgggcagttgccagaccggtgcgccgaccgaaaccgtcggcggcaacacgcacctgctgtattcgtgggccggcacggcgatccagccgacgctctccgtgttcggcgtcacgggcgcgacggacacgagcacccttccgctcgtcgatccggcgaacgtgctcgacctgtcgacgctcgcgctgttcggcaccggcacggtgatgatcaaccgcggctccgggcagaacgacgggctcgtgtcgaagtgcagtgcgctgtacggcaaggtgctgagcacgagctacaagtggaaccacctcgacgagatcaaccagctgctcggcgtgcgcggcgcgtatgcggaagatcccgtcgcggtgatccgcacgcatgcgaaccggctgaagctggcgggcgtgtaataaggctgagatcttcttcagtgcattgtagttgaatgaagggttaggggggaaatgcccccctattttttgtctagccatcctgccacgtttgacagggtagcaatttcgacacgatagggttctctcttctgccgtta

SEQ ID NO: 207 - DNA, 2098 bp, Artificial Sequence
  SEQ ID NO: 207 presents example 207 of a designer Thermosynechococcus elongatus  nirA-promoter-controlled Pyruvate Decarboxylase DNA construct (2098 bp)
agaaaatctggcaccacacctgacccccatcgagagactccgaacgtggcaaatggagggaccagagttgttcagttcacaggtagataatgtcgcgggtcttgatagttagcaataaatacagtttcagaatatctgtaatacaaaaactgtatcgagacaagaaaaaagtagcaaaatttacaaatgttcatgattcatctggctaaattggatgttcaactgacccattgaagacaagggcaacaaccatgagttatactgtcggtacctatttagcggagcggcttgtccagattggtctcaagcatcacttcgcagtcgcgggcgactacaacctcgtccttcttgacaacctgcttttgaacaaaaacatggagcaggtttattgctgtaacgaactgaactgcggtttcagtgcagaaggttatgctcgtgccaaaggcgcagcagcagccgtcgttacctacagcgttggtgcgctttccgcatttgatgctatcggtggcgcctatgcagaaaaccttccggttatcctgatctccggtgctccgaacaacaacgaccacgctgctggtcatgtgttgcatcatgctcttggcaaaaccgactatcactatcagttggaaatggccaagaacatcacggccgccgctgaagcgatttacaccccggaagaagctccggctaaaatcgatcacgtgatcaaaactgctcttcgcgagaagaagccggtttatctcgaaatcgcttgcaacactgcttccatgccctgcgccgctcctggaccggcaagtgcattgttcaatgacgaagccagcgacgaagcatccttgaatgcagcggttgacgaaaccctgaaattcatcgccaaccgcgacaaagttgccgtcctcgtcggcagcaagctgcgcgctgctggtgctgaagaagctgctgttaaattcaccgacgctttgggcggtgcagtggctactatggctgctgccaagagcttcttcccagaagaaaatgccaattacattggtacctcatggggcgaagtcagctatccgggcgttgaaaagacgatgaaagaagccgatgcggttatcgctctggctcctgtcttcaacgactactccaccactggttggacggatatccctgatcctaagaaactggttctcgctgaaccgcgttctgtcgttgtcaacggcattcgcttccccagcgttcatctgaaagactatctgacccgtttggctcagaaagtttccaagaaaaccggttctttggacttcttcaaatccctcaatgcaggtgaactgaagaaagccgctccggctgatccgagtgctccgttggtcaacgcagaaatcgcccgtcaggtcgaagctcttctgaccccgaacacgacggttattgctgaaaccggtgactcttggttcaatgctcagcgcatgaagctcccgaacggtgctcgcgttgaatatgaaatgcagtggggtcacattggttggtccgttcctgccgccttcggttatgccgtcggtgctccggaacgtcgcaacatcctcatggttggtgatggttccttccagctgacggctcaggaagttgctcagatggttcgcctgaaactgccggttatcatcttcttgatcaataactatggttacaccatcgaagttatgatccatgatggtccgtacaacaacatcaagaactgggattatgccggtctgatggaagtgttcaacggtaacggtggttatgacagcggtgctgctaaaggcctgaaggctaaaaccggtggcgaactggcagaagctatcaaggttgctctggcaaacaccgacggcccaaccctgatcgaatgcttcatcggtcgtgaagactgcactgaagaattggtcaaatggggtaagcgcgttgctgccgccaacagccgtaagcctgttaacaagctcctctagtaaggctgagatcttcttcagtgcattgtagttgaatgaagggttaggggggaaatgcccccctattttttgtctagccatcctgccacgtttgacagggtagcaatttcgacacgatagggttctctcttctgccgtta

SEQ ID NO: 208 - DNA, 1567 bp, Artificial Sequence
  SEQ ID NO: 208 presents example 208 of a designer Synechocystis sp. PCC 6803 nirA-promoter-controlled Lipase DNA construct (1567 bp)
agaaaatctggcaccacaccctaaatgcgtaaactgcatatgccttggctgagtgtaatttacgttacaaattttaacgaaacgggaaccctatattgatctctacatgatgaagctactctctctgaccggtgtggctggtgtgcttgcgacttgcgttgcagccactcctttggtgaagcgtctaccttccggttcggaccctgccttttcgcagcccaagtcggtgctcgatgcgggtctgacctgccagggtgcttcgccatcctcggtctccaaacccatccttctcgtccccggaaccggcaccacaggtccacagtcgttcgactcgaactggatccccctctcaacgcagttgggttacacaccctgctggatctcacccccgccgttcatgctcaacgacacccaggtcaacacggagtacatggtcaacgccatcaccgcgctctacgctggttcgggcaacaacaagcttcccgtgcttacctggtcccagggtggtctggttgcacagtggggtctgaccttcttccccagtatcaggtccaaggtcgatcgacttatggcctttgcgcccgactacaagggcaccgtcctcgccggccctctcgatgcactcgcggttagtgcaccctccgtatggcagcaaaccaccggttcggcactcaccaccgcactccgaaacgcaggtggtctgacccagatcgtgcccaccaccaacctctactcggcgaccgacgagatcgttcagcctcaggtgtccaactcgccactcgactcatcctacctcttcaacggaaagaacgtccaggcacaggccgtgtgtgggccgctgttcgtcatcgaccatgcaggctcgctcacctcgcagttctcctacgtcgtcggtcgatccgccctgcgctccaccacgggccaggctcgtagtgcagactatggcattacggactgcaaccctcttcccgccaatgatctgactcccgagcaaaaggtcgccgcggctgcgctcctggcgccggcagctgcagccatcgtggcgggtccaaagcagaactgcgagcccgacctcatgccctacgcccgcccctttgcagtaggcaaaaggacctgctccggcatcgtcaccccctgatagtaatgagttacagttttggcaattactaaaaaactgacttcaattcaatgttagcccgctcccgcgggttttttgttgctttttcacagtgactataggtaatcagcaacacaatacggccctgttctttggacagtttttgtataatgttgaccgcatcctgaccggattttttatctaagtggggaattgtcaattgtcaattaaagctaagttctactaatgttttagaaggcattgtcgattgaaaataagggttgaatggagaaaattttgagcctttgtcaaagataaaaatttatttcaacagttttttaactagccgaaccagagaatgacccagtggcgctgactttgctcccgagtttttgttagaaattaccctcaagaagtaatctaataataaggttctctcttctgccgtta

SEQ ID NO: 209 - DNA, 2075 bp, Artificial Sequence
  SEQ ID NO: 209 presents example 209 of a designer Anabaena PCC 7120  hox-promoter-controlled Lipase DNA construct (2075 bp)
agaaaatctggcaccacaccgcagaaatataggggctaggagttgagggtactctggttcgtcaagcatttgggatgatttcccctcacaagttcctcaaattattctcctataaacaatagatataaggtcaaaacttgagttatgagtgctgagtaaaaaattactctccacgcctcagaggtagatatgatgggtatctttgactataaaaaccttggcaccgagggttccaaaacgttgttcgccgatgccatggcgatcacgttgtattcctatcacaacctggataacggctttgccgtgggctaccagcacaacgggttgggcttggggctaccggccacgctggtcggtgcgctgctcggcagcacggattcccagggcgtgatccctggcatcccgtggaacccggattcagaaaaagccgcccttgaggcggtgcagaaagccggttggacaccgatcagcgccagtgccctgggctacgccggcaaggtcgatgcacgtggcaccttctttggggaaaaagccggctacaccacggcccaggtcgaggtactcggcaaatacgatgacgccggcaagctgctcgaaatcggcatcggttttcgtggcacttcggggccacgggaaaccttgatcagcgactcgatcggcgacttgatcagcgatctgctcgcggccctggggcccaaggattacgcgaaaaactacgccggcgaagccttcggcggcttgctcaagaatgttgccgactacgccggtgcccatggcctgaccggcaaggacgtggtggtcagcggccacagcctgggcgggctggcggtcaacagcatggcggacttgagcaactacaaatgggcggggttctacaaggacgccaactatgttgcctatgcctcgccgacccagagtgccggcgacaaggtgctcaatatcggttacgaaaacgacccggtgttccgcgcgctggacggctcgtcgtttaacctgtcgtcgctgggcgtgcacgacaaaccccacgagtccaccaccgataacatcgtcagcttcaacgaccactacgcctcgacgctgtggaatgtgctgccgttttccatcgtcaacctgcccacctgggtctcgcatttgccgacggcgtacggcgatggcatgacgcgcatcctcgagtccggcttctacgaccagatgacccgtgactccacggtgattgttgccaacctgtccgatccggcgcgggccaacacctgggtgcaggacctcaaccgcaatgccgagccccacaagggcaacacgttcatcatcggcagcgacggcaacgacctgatccagggcggcaacggtgcggactttatcgagggtggcaaaggcaacgacacgatccgcgacaacagcgggcacaacacctttttgttcagcggccactttggcaatgatcgcgtgattggctaccagcccaccgacaaactggtgttcaaggacgtgcaaggaagcaccgacctgcgtgaccacgcgaaggtggtcggcgccgatacggtgcttacgtttggggccgactcggtgacgctggtcggcgtggggcatggcgggctgtggacggagggcgtggtgatcggctgatgaagtaagtaggaagcagggagcaggggaaagaaaattgacaactgtacaagattaatcgcgtctctgagcaatgaccaaatacatctacctccacggttttcttccagccccctatctgcgaaagcacaagatattagcaagcgtttcgcccaaattcacatacagctaacaatccctgatctcaatgctggtgaattttctcagttaacaatcacgcgccaaattcaacaagttgccgcaattttccctgataattctgaaccaataacgctgataggttctagtttaggcggtttaactgctgcttatctaggacagcgatatttacaagtacaacgcttagttttattagcgccagtttggttttttatcccattggttgcccaaaatgggtgaagaagctgtcacaagttggcaacaaacgatataggttctctcttctgccgtta

SEQ ID NO: 210 - DNA, 2290 bp, Artificial Sequence
  SEQ ID NO: 210 presents example 210 of a designer Synechococcus sp. strain PCC 7942 nirA-promoter-controlled Lipase gene DNA construct (2290 base pairs (bp))
agaaaatctggcaccacacccttcttgcagaacatgcatgatttacaaaaagttgtagtttctgttaccaattgcgaatcgagaactgcctaatctgccgagtatatgatgggtgtgtatgactacaaaaacttcggcacggcggattccaaggcgttgttcagcgatgccatggcgatcacgctgtattcctaccacaacctcgataacggttttgccgccggttatcagcacaacggttttggccttggcctgccggcgacgctggtcacggcgttgctcggcggtaccgattcccagggcgtcatccccggcattccgtggaatcccgattcggaaaaactcgccctcgaagccgtgaaaaaggccggctggacgccgatcacggcctcgcaactgggctacgacggcaagaccgacgcacgcggaaccttctttggcgagaaggccggttactcgacagcgcaggtcgagattctcggcaagtacgacgcccagggccatctcacagaaatcggcatcgcctttcgcggcaccagcggcccgcgcgagaacctgatccttgattccatcggcgacgtgatcaacgacttgctcgccgcgttcggccccaaggattacgccaagaactacgtcggcgaagcgttcggcaacctgctcaatgacgtggtcgcctttgccaaggccaatggcctcagcggcaaggacgtgctggtcagcggccacagcctcggcgggctggcggtcaacagcatggcggatttgagcggcggcaagtggggcgggttcttcgccgactccaactacatcgcctatgcctcgccgacccagagcagcaccgacaaagtgctcaacgtcggctacgagaacgacccggtgttccgcgccctcgacggttcgaatttcaccggcgcctcgattggcgtgcacgacgcgccgaaggaatcggccaccgacaacatcgtcagcttcaacgatcactacgcctcgacggcgtggaatctgctgccgttctccatcctcaacatcccgacctggatctcgcacctgccaaccgcttacggcgacggcatgaaccgggtgatcgagtcgaagttctacgacctgaccagcaaggactcgacgatcatcgtcgccaacctgtcggatccggcgcgggccaacacctgggtgcaggatctcaaccgcaacgccgaaacccacaagggcagcaccttcatcatcggcagcgacgccaacgatctgattcagggtggcagcggcaatgactatctggaaggtcgcgccggcaacgacacctttcgcgacagcggcggctacaacatcatcctgggcgggcagggcagcaatacgctggacttgcagaagtcggtgaataccttcgacttcgccaacgacggcgccggcaatctgtacattcgcgatgccaacggcgggatcagcatcacccgcgacatcggcgccatcgtcaccaaagagccgggcttcctctggggtctgttcaaggacgacgtgacccacagcgtcacggccagtggcttgaaggtcggcaacaacctgaccgcctacgagtcgagcgtgaagggcagcaacggcgccgacacgctcaaggcgcatgccggcggcgactggttgttcggcctcgacggcaacgatcatctgatcggcggggcgggcaacgatgtgtttgttggcggcgccggtaacgatctgatggagtccgggggcggggcggatacgttcctgttcaacggcgcgttcggccaggatcgggtggtgggattcacgtccaacgacaaactggtgtttctcggcgtgcagggtgtgttgcctggcgatgacttccgagcgcatgcctcggcagccgggcaggataccgtgctgaagttcggcggcgattcggtgacattggttggcgtttcgctggggagtttgagtggcgatggaattgtgatcgcctgataatagtgatcccggccgctactaaagcctgatttgtcttgatagctgctcctgcctttgggcaggggcttttttctgtctgccattcttgaggatggcggactctttcccttttgctctacgcccatgaatgcgatcgcagtctcccctgtccagcacgttggagtgattggtggtggccagttagcttggatgctggcaccagcagcgcaacagttggggatgtcgctgcacgttcaaacacccaatgatcacgacccagcagtagcgatcgcggatcaaaccgtattagcagcagttgctgacgcggttctctcttctgccgtta

SEQ ID NO: 211 - DNA, 1231 bp, Artificial Sequence
  SEQ ID NO:211 presents example 211 for a designer Prochlorococcus marinus MIT9313  groE-promoter-controlled Lipase DNA construct (1231 bp)
agaaaatctggcaccacaccccctttcagagcggcgcaacattaccactgcatggcgagatcttctcagggttcggtgacccgcacaggtatccactagtcggcacagcatcaacacacatagggttggcactcaatggccacgagtgctactcatggtgctggggctgttcgccgcgccccggctgaatatgcgggaggactacgagaaggtccgtcatctgcagcggcagcttgccgcccgacccgggcagcggttccgggccgcctcctggcggaccatcgccgaggacggcgacagtcatgtgccggtccgggtctttacgccgaaggagcgtcggcgcgaggacctgctcctgttcttccatgggggcggctgggtcaccggcgatatcgagagctacaccccggcctgctccacgatggcggacctcaccggctgcgtcgtcatctccgtcgactaccggctcgcccccgagcacccgtaccccgcgggtctcgaggactgctaccagatcgtgcagcgactgctggatgaaccggagctggcccagctcgacgatccgcatcggatcgtcctggtgggcgactccgcgggcggcaacctcgcggccgccgtctccctgctgctgcgcgagcgcggccatcgtggggtggaccggcagatcctgctgtacccggtgacccattgggatcatgacccggagacctcccccttcgcctccgtgcgccaccacggtgaggactatcgcctgaccaacaccgaggtccaggactacatggagctctatgtccccgatccgaccatgcgccgcgacccgctggtgtccccgctgatggcgacggacctctcctcccaaccggcgacgctgctgatcagcgcagagctcgacctgctgtgcgacgagggcgaggcctacggtcgggctctcgaggaggccgggaacaccgtgcgcatccaccgcgtggagggggctctgcacggcttcatctccctgccccggttctcccggtcgctccgagacgcctacgaggtgatcaacgcgttcctcgacgaggacggggccgcccatccggaggagacgacgtgatgatttagtttcggtgtctatctcttaatagcctcgatttattttcggggctattaatcaactctcagaggcgacaagcttcttcttcccttacgacgtttttattggttggacatggcaaggttctctcttctgccgtta

SEQ ID NO: 212 - DNA, 1386 bp, Artificial Sequence
  SEQ ID NO:212 presents example 212 for a designer Cyanothece sp. ATCC 51142 nirA-promoter-controlled Lipase DNA construct (1386 bp)
agaaaatctggcaccacacctattaaatctaaaatagctgttttagctaaaatagtcaatagcaagtcttataggtaatcaaacgcaactaaaatgcaaaaaatccataattaaaatgcaaaaaacggatttttaatacaattttgttacattagctacaaaatatctcaaatggtagaggttaaataggtacaactcgaccagatggagggttttccctgtggtgagcacgttcacacttccgctgcccgtggtcgcattcttgttgaagccgtacttccgtctggctttcaactcgcgactgccgtaccggattcaacgtccgttgctcgacgccggggcaccgctacagcaggttccagcgggcgctgtcgtgcgcccgctggagctcgcctgccgaccggcggagaagatcaccgtcggcgcaaccgagcgccccaccgcagttctgtacctgcacggcggggcgtacacgcttggctcgctggcaacccaccgttctctcgcagcgcatctcgcgcgtgaatcgtccagtgcggtcttcaccttggactaccgcctcgcaccggagaacccgtatcccgcagctctcgacgacgcggtctccgccttcatgcagttggtcaccgagttcgactattcggaagaccgcgttgccatcgccggcgattcggccggtggcggtttggccgccgcgaccgctctgcgtctgatcgaacgtcacggtgtgacccccggtgcgcttgctctgatctcgccgtgggtcgatcccggcgatcgaggtgccaccaagaaggccgacctggtcgtcaatacagcctggtccttcgatgccgccgacgcttaccttgccggcggcgatcgcacagatcccggctacgcaccgatgcacgggaagctcgacgggttgccgcccaccaggattcacgtcggttccgaagaagttctctacccgcagatcatgacgttcaccgacaagctctccgctgccggcgtcgatgtgtccctggtcgagtacgcaagactgtggcacgtggctcacgcacaggcgtcactggtgaaggaagcagcagacgccgtcgccgatctggggggcttcatcgcatcgaaactgattcgcgccaagaatgattcgagttcagcagtaggctcgaacagtcactgataagctgttttagagaaatttgttcggtaaatattagcctacctacagttgttgtgggtaggctaatattatgaattgagtcctactgaaccaatgattatcgttacgactaaaagtaataaatgtcatcagcaggataggggttgataggaaaagttttttaatcggatggttttcgagttagaggttagggtttctttaggttctctcttctgccgtta

SEQ ID NO: 213 - DNA, 2420 bp, Artificial Sequence
  SEQ ID NO. 213 presents example 213 of a designer Chlamydomonas reinhardtii Nial-promoter-controlled chloroplast-targeted Lipase DNA construct (2420 bp)
agaaaatctggcaccacaccatggtagggtgcgagtgaccccgcgcgacttggaagggttcaaacgaccccgccgtacgaacttttgtcggggggcgctcccggatggtagggtgcgagtgaccccgcgcgacttggaagggttcaaacgaccccgccgtacgaacttttgtcggggggcgctcccggatggccgccgtcattgccaagtcctccgtctccgcggccgtggctcgcccggcccgctccagcgtgcgccccatggccgcgctgaagcccgccgtcaaggctgcccccgtggctgccccggctcaggccaaccagatgggtgtgtatgactacaagaacttcggcacagccgattccaaagcgttattcaccgacgctatggcgatcacgctgtattcctatcacaacctcgacaatggctttgccaccggctaccagcacaacggcttcggcctgggcttgccggcgactttggttaccgcgctgctgggcggcaccgactctcaaggcgtgatccccggcattccctggaaccccgattcggaaaaagccgccctggaggccgtgcaaaaagccggctggacgcccatcacggcctcgcaactgggttatgacggcaaggtcgacgctcgcggaacgttcttcggcgagaaggccgggtacaccagcgcgcaggtcgaaatcctcggcaagtacgatgctcaaggccatctcagcgaaatcggcatcgcctttcgcggcaccagcggcccgcgggaaatcttgatcggcgattccatcggcgacgtgatcaacgatctgctggcggcgctaggtcccaaggattatgcgaaaaactatgtgggtgaagccttcggcaatctgctcggcgacgtcatggcgtttgcccaggccaatggcctgtcgggaaaaaacgtgctggtcagcggccacagcctcggcgggctggcggtcaacagcctggcggacttgagcgcggagaagtggtccgggttctaccaggattccaactacatcgcctacgcgtccccgacccagagcagcaccgacaaagtgctcaatgtcggctatgaaaacgacccggtttttcgggctctcgacggttcatccttcaacctttcgtcggtgggtgtgcacgatgccgccaaggcctcggcgaccgataacatcgtcagcttcaacgatcactacgcctcgaccgcatggaatgtgctgccgttctccatcctcaacatcccgacctggatctcgcacttgccgaccgcctatggcgacggcatgaaccgggtgatcgaatcgaagttctacgacctcaccagcaaggactcgacgatcgtcgtcgccaatctctcggacccggcacgcgccaatacctgggttcaggacctcaatcgcaacgccgaaacccacaagggcagtaccttcatcatcggcagcgacggcaacgacctgattcagggtggcaagggtaacgactacctggaggggcgtgacggtaacgacaccttccgtgacggcggcggctacaacatcgtattgggtggcaagggcagcaacgtgctggacttgcagcagtcggtgaaaaatttcaactttgccaacgatggcgccggcaccctctatgttcgtgacgccaatggcggtatcagcatcacccgagacatcggcagtattgtcaccaaggaaccggggttcttgtgggggctgttcaaggatgatgtgacgcacagtgtgacggccaatggacttgccgtcggcaacaacctgacgtcatacgcgtcatcggtgaagggcggcacgggggccgatacgctcaaggcgcatacgacgggcgattggttgttcggtctggacggcaacgatcatttgatcggcggccagggcaacgatgtgtttgtgggcggggcggggaatgacctgatggaatcggggggcgggattgatacgttcctgttcagcggtgcgtttggtcaggaccgggtggtggggtatcaggcaaacgacaagctggtattcctcggggttcagggggtcgcgccgaatgatgactatcgggctcatgccacgacggtggggcaggatacggtgctgacgtttggcggggattcggtgacgttggttggggtggcgctcaatagcctcagtgctgatggaatcgtgatcgcctgataaatggaggcgctcgttgatctgagccttgccccctgacgaacggcggtggatggaagatactgctctcaagtgctgaagcggtagcttagctccccgtttcgtgctgatcagtctttttcaacacgtaaaaagcggaggagttttgcaattttgttggttgtaacgatcctccgttgattttggcctctttctccatgggcgggctgggcgtatttgaagcggttctctcttctgccgtta

SEQ ID NO: 214 - DNA, 6498 bp, Artificial Sequence
  SEQ ID NO: 214 presents example 214 of a designer Synechocystis sp. PCC 6803 transcription factor-arginine-based alcohol-selection DNA construct (6498 bp)
agaaaatctggcaccacacctctaccacatagtccgccaagcgccgatcccggttgagcgccagggccacatcccggaccagatcctcgacgaatttcggattgtcataggcccgctcggtaacgaatttctcgtccggccgcttgagaagcccgtacacctcgcaggaggcgctctcttcggcgacggcgatcaattcctcgatcagcatgtcgccagccagcctcacctcgatgccgatatgggagcgctggttgtgggcgccgtagtcggagattcccttggagcaggggcacaggctcgtcgccggcaccaggacgcgcaaggaaaaggaatactccccggcatcggataccgagccctgccagcagacctcgtagtcgaggaggctccgcacacccgacaccggcgccgtcttgctcacgaaatagggaaagcgcatctcgatcgtgcccctcctcgcctccagcctgtccaacattgcgagggccagggctttgaacgccgcctgatccagcgggccggtctgctcctccatcagttcgacgaagcgggacatgagggttcccttgacgtgcgccgccaaaccgacggtgagcgacagggtggcaacggtcgccagccgctcggcgcccgaccggatggtggcagggtatctgaggcccttgaccccgaccgcatgtatgggtaggtcacggccatccagttgcgactggacgtccggcatcagagttgctctgtcaggggcattcatctcggtccttcctcgggaatggggtcgaacaaaacggagaactggccgcactagagtaaagtagataaaatcctttctcaatggttttatgtataaagccccagagccaccgaccgtgtcgatgcggagcgcgtcaggaggcgagtccaggacagtcggagagcgtgacatgcttgccatattgggaacgcgccagcgggagttgctgaagctcctcctgaggagcaagggcggtttgacggtggtcgagctctcggcgcggctgggcatctccagcaacgcggttcgccagcatcttgccgccctggagaacgaggggctggtcgcccacggcgagtcccgtccttccggcgggcggccggagcaactctacgtgctcactgcggcgggcaaggagctttttccccgtcagtattcctggttcgcccagttggtggtcgagtccatgaagcaggaagccggcgccgaggcgacgcgggaacgcctcgcggccatgggatcgggcattgcccgcttgttgctccgtcagcatggcgggctcgaaggccggcggcagcgcgtggccaagctcgccgaactcatggaggcgctgggttacgagatcggcagcgtcgatgccgaaggcaaagagccggtgattgaggccaacaactgcgttttccacaagctcgccatggacgacccggatatctgcgagttcgacctggccctgctgtccacgtttacggacagcaaggtcgaccatcaggagtgcatcgccaagggcggcaatgtctgtcgtttccggttctcgcgaaaacgctaatacatccggtaatgaacgtgcgctaccacactttgatggctcaccccacagacacgctgcgtggcagaccgtgcaccagggcgtcgtgccggcgcactgcaactggattatgatatcgccatcgaccgccgccgacggcaacgcccggtagacgaacgtgtacgccgccggcgacggcatgaacgccaagcatcgtcctcaatcaggtacgagatccggagaacctgagtgcggagcgacgttctattttcgtattcagtaacaatttgtcgagaatcggtctgatccgcggcttcacgcacctgcccgaggggcttgcgcggaccttgaggtgaccttgagcgggcagataccaccaaaatttcccacgtgctattatggttttgctaaagctctcgacagcgaggagagactcgcgaagataagcaattcgcccgacagaggtgaatgaggagacggtatgtccaagatgcaagagttcgcgcggctggagacagtcgcgtcgatgcgcagagcggtctgggacggcaacgagtgtcagccggggaaagtggctgatgtcgttttgcgctcgtggacccggtgtcgtgctgaaggtgtcgttcccaatgcccgccaggagttcgacccgatcccgcgaacggcgcttgacgaaacggttgaggccaagcgggcgctgatccttgctgccgagccggtcgtcgacgcgttgatggagcagatgaacgacgcccccaggatgatcatcctgaacgacgaacggggcgtcgtgctgctgaaccagggaaacgacaccctccttgaagacgcccgccgccgggccgtgcgggtgggcgtctgctgggacgaacacgcccgaggcaccaatgccatgggaaccgcgctcgcggagaggaggcccgtagcgatccacggcgcagagcactacctcgagtcgaatacgattttcacctgcaccgcggcgccgatctacgatccgttcggcgagttcaccggaattctggatatcagcggatatgcgggggacatgggcccggttccgattccctttgttcagatggcggtgcaattcatcgagaatcagttgttccgccagacctttgccgattgcattctgctgcactttcatgtgcgccccgacttcgtcggaacgatgcgcgaagggatagccgtgctgtcgcgcgagggaaccatcgtctcgatgaaccgtgctgggctcaagatcgcagggctcaacctggaggccgtcgccgatcaccgtttcgattccgtcttcgacttgaatttcggggcctttctcgaccacgtgcggcagtccgccttcggtctcgtccgcgtctcgctctacggcggcgttcaggtctacgcccgagtggaaccgggcctgcgtgttccgccacgtccggccgcccacgcccgccctcctcggccggcaccgcggcctctggattcgctggacacgggcgacgcagcagtccgcctcgcgattgaccgcgcccgccgcgcgatcggccgcaacctcagcatcctcatccagggcgagacgggtgccggcaaggaagtgttcgccaagcatctgcatgccgagagcccgagaagcaaggggccgttcgttgccgtcaattgcgccgccatacccgagggtttgatcgagtccgagcttttcggatacgaagaaggggccttcactggcggacggcgcaaaggcaacatcggcaaggtcgcccaggcccacggcggcacgttgttcctcgacgagatcggagacatggcgccggggctgcagaccagactgctgcgggttctacaggaccgggcagtgatgcccctcggcggtcgcgaacctatgccggtcgacattgcgctggtatgcgcgacgcaccgcaatttgcgcagcctgatagcgcagggccagttccgcgaagacctctactaccgcctgaacgggctggcgatctcgctgccacccctgcgtcaacgtagcgaccttgccgccctggttaaccatatcctctttcagtgttgcgggggcgagccgcactacagcgtgagcccagaagtgatgacgctcttcaagcggcatgcgtggcccggcaacctacgccaactacataacgttctcgatgcagcgcttgccatgctcgacgacggccatgtcattgagccccatcacctccccgaagacttcgtcatggaggtcgattcgggcctccgaccgatcgaggaagacggttcgacggcggcgcatcgcgcgcgacagccggcgtcgggaagcggtcctgccaaaaagttgcaagatctcgcgttggatgccatcgagcaggcgatcgagcaaaacgagggaaatatatcggtcgccgcacggcagttgggggtcagccggaccacgatctaccgcaagctgaggcaactttcaccaaccggttgtcaccgaccggcacattggagccagtcgcggatcggcacatagaggccagcgccggatcggcgtaatggagccacttcccctctgacggacgtctcgaccttgaccggtccatcgctaccctgctgcctttttgttcggcaggaggtaggcggtggcccgcaggagcatcgagccccccaacgacgtccgtcagagcccggttcgagtggcttctatatgccgatcatcggtggctctattgtggcggtcagtgacaccggtcgccttcacccccacagatagtaggtgctgcggctgctcatgctcctgtcgcggtagcgcgctgttacgcgaccgcccccggacctcggcggacagcgcggaagattggaaacagcccgagcgtgcgtgcctcgggctgcatccttgccacacccaaccggattcgtcggaccgctcgacattcgcgttcgctcccgcggcgccgcgggtgtaccgttgcgttacagatgtacccttctttaacgtgtaacacacgcctggagcggccaagagccccgcaccttgcggcgcgtcttccccaggggcccaccggttgcggccttttgctgcgaccgtccatgctggcacgacacttgctgaaagcgttagagcggaatcggtccgatggagcattcgaagccgctaccgacagcagaacacacaaaggaggaagtgatgacaaaaaaaacctggagcgatcgttttgaaggcacattgcaccccgccattgccctgtttaatgccagcattggttttgacattgaactaatcgaatatgacctggatggctcgatcgcccatggcaaaatgttggccaagacgggcattatcagcccaggggaagcagaacagctagtgcagggcttggagcaaattcgccaggaataccgagccggtaatttcaatccaggggtagaccaggaagacgttcactttgctgtggaacgccgattaacagaattggtgggggatgtgggcaaaaaactccacactgcccgttcccgcaatgaccaagtaggaaccgatgttcgtctttacctgcgtgcccaaattgatgacatccgccaacggttaagggattttcaagcagtgttgctccaactggcggaaaccaatgtggaaaccttaattcccggctacacccacctacaacgggcccaaccggtcagtttggctcaccatctactggcctatttccagatggcccaacgggattggcaacggttaggggaaattcgagctagaactaacgtttctcccctcggttctggggctttagcaggaacaacttttcccatcgatcgccattacagtgccgaattgttggggtttgcaggggtttacgccaacagcttagatggggtgagcgatcgggattttgccattgaatttctcaacgccgccagtttgatcatggtgcacctcagtcggctgagcgaagaaatgatcctctgggcttcccaggaatttagctttatcagtttgaccgatagctgtgccacaggatcaagcattatgccccaaaagaaaaatccagacgtaccagagttaattcggggtaaagccgggcgggtgatgggtcatctgcaaggaatgctagtactgatgaaaggtttgcccctggcctataacaaggatttgcaggaagacaaggaagccctgtttgatgcagtaaaaacggtgcaagtgagcctggaagccatgaccattttgcttgatgaaggtattgtttttcgtcaagaacggttagcggaggcggtggcggaagatttttccaatgcgacggatgtggcggattacttggcggctaagggagtccccttccgggaagcttataatctggtgggcaaggtggttaaaaccagtttggcggcagggaaattgctcaaggatttaaccctggcggaatggcaagcgctccatcccgcttttgaagaggatatttaccaagctattaccccccagcaagtggtggcggcacgcaatagttacgggggcacgggctttgaacaggtgaaaatggcgatcgccaatgccaaagctgaattaagccagacttaatagtaatgagttacagttttggcaattactaaaaaactgacttcaattcaatgttagcccgctcccgcgggttttttgttgctttttcacagtgactataggtaatcagcaacacaatacggccctgttctttggacagtttttgtataatgttgaccgcatcctgaccggattttttatctaagtggggaattgtcaattgtcaattaaagctaagttctactaatgttttagaaggcattgtcgattgaaaataagggttgaatggagaaaattttgagcctttgtcaaagataaaaatttatttcaacagttttttaactagccgaaccagagaatgacccagtggcgctgactttgctcccgagtttttgttagaaattaccctcaagaagtaatctaataataaggttctctcttctgccgtta

SEQ ID NO: 215 - DNA, 7034 bp, Artificial Sequence
  SEQ ID NO: 215 presents example 215 of a designer Thermosynechococcus elongatus transcription factor and nitrate reductase-based alcohol-selection DNA construct (7034 bp)
agaaaatctggcaccacacctctaccacatagtccgccaagcgccgatcccggttgagcgccagggccacatcccggaccagatcctcgacgaatttcggattgtcataggcccgctcggtaacgaatttctcgtccggccgcttgagaagcccgtacacctcgcaggaggcgctctcttcggcgacggcgatcaattcctcgatcagcatgtcgccagccagcctcacctcgatgccgatatgggagcgctggttgtgggcgccgtagtcggagattcccttggagcaggggcacaggctcgtcgccggcaccaggacgcgcaaggaaaaggaatactccccggcatcggataccgagccctgccagcagacctcgtagtcgaggaggctccgcacacccgacaccggcgccgtcttgctcacgaaatagggaaagcgcatctcgatcgtgcccctcctcgcctccagcctgtccaacattgcgagggccagggctttgaacgccgcctgatccagcgggccggtctgctcctccatcagttcgacgaagcgggacatgagggttcccttgacgtgcgccgccaaaccgacggtgagcgacagggtggcaacggtcgccagccgctcggcgcccgaccggatggtggcagggtatctgaggcccttgaccccgaccgcatgtatgggtaggtcacggccatccagttgcgactggacgtccggcatcagagttgctctgtcaggggcattcatctcggtccttcctcgggaatggggtcgaacaaaacggagaactggccgcactagagtaaagtagataaaatcctttctcaatggttttatgtataaagccccagagccaccgaccgtgtcgatgcggagcgcgtcaggaggcgagtccaggacagtcggagagcgtgacatgcttgccatattgggaacgcgccagcgggagttgctgaagctcctcctgaggagcaagggcggtttgacggtggtcgagctctcggcgcggctgggcatctccagcaacgcggttcgccagcatcttgccgccctggagaacgaggggctggtcgcccacggcgagtcccgtccttccggcgggcggccggagcaactctacgtgctcactgcggcgggcaaggagctttttccccgtcagtattcctggttcgcccagttggtggtcgagtccatgaagcaggaagccggcgccgaggcgacgcgggaacgcctcgcggccatgggatcgggcattgcccgcttgttgctccgtcagcatggcgggctcgaaggccggcggcagcgcgtggccaagctcgccgaactcatggaggcgctgggttacgagatcggcagcgtcgatgccgaaggcaaagagccggtgattgaggccaacaactgcgttttccacaagctcgccatggacgacccggatatctgcgagttcgacctggccctgctgtccacgtttacggacagcaaggtcgaccatcaggagtgcatcgccaagggcggcaatgtctgtcgtttccggttctcgcgaaaacgctaatacatccggtaatgaacgtgcgctaccacactttgatggctcaccccacagacacgctgcgtggcagaccgtgcaccagggcgtcgtgccggcgcactgcaactggattatgatatcgccatcgaccgccgccgacggcaacgcccggtagacgaacgtgtacgccgccggcgacggcatgaacgccaagcatcgtcctcaatcaggtacgagatccggagaacctgagtgcggagcgacgttctattttcgtattcagtaacaatttgtcgagaatcggtctgatccgcggcttcacgcacctgcccgaggggcttgcgcggaccttgaggtgaccttgagcgggcagataccaccaaaatttcccacgtgctattatggttttgctaaagctctcgacagcgaggagagactcgcgaagataagcaattcgcccgacagaggtgaatgaggagacggtatgtccaagatgcaagagttcgcgcggctggagacagtcgcgtcgatgcgcagagcggtctgggacggcaacgagtgtcagccggggaaagtggctgatgtcgttttgcgctcgtggacccggtgtcgtgctgaaggtgtcgttcccaatgcccgccaggagttcgacccgatcccgcgaacggcgcttgacgaaacggttgaggccaagcgggcgctgatccttgctgccgagccggtcgtcgacgcgttgatggagcagatgaacgacgcccccaggatgatcatcctgaacgacgaacggggcgtcgtgctgctgaaccagggaaacgacaccctccttgaagacgcccgccgccgggccgtgcgggtgggcgtctgctgggacgaacacgcccgaggcaccaatgccatgggaaccgcgctcgcggagaggaggcccgtagcgatccacggcgcagagcactacctcgagtcgaatacgattttcacctgcaccgcggcgccgatctacgatccgttcggcgagttcaccggaattctggatatcagcggatatgcgggggacatgggcccggttccgattccctttgttcagatggcggtgcaattcatcgagaatcagttgttccgccagacctttgccgattgcattctgctgcactttcatgtgcgccccgacttcgtcggaacgatgcgcgaagggatagccgtgctgtcgcgcgagggaaccatcgtctcgatgaaccgtgctgggctcaagatcgcagggctcaacctggaggccgtcgccgatcaccgtttcgattccgtcttcgacttgaatttcggggcctttctcgaccacgtgcggcagtccgccttcggtctcgtccgcgtctcgctctacggcggcgttcaggtctacgcccgagtggaaccgggcctgcgtgttccgccacgtccggccgcccacgcccgccctcctcggccggcaccgcggcctctggattcgctggacacgggcgacgcagcagtccgcctcgcgattgaccgcgcccgccgcgcgatcggccgcaacctcagcatcctcatccagggcgagacgggtgccggcaaggaagtgttcgccaagcatctgcatgccgagagcccgagaagcaaggggccgttcgttgccgtcaattgcgccgccatacccgagggtttgatcgagtccgagcttttcggatacgaagaaggggccttcactggcggacggcgcaaaggcaacatcggcaaggtcgcccaggcccacggcggcacgttgttcctcgacgagatcggagacatggcgccggggctgcagaccagactgctgcgggttctacaggaccgggcagtgatgcccctcggcggtcgcgaacctatgccggtcgacattgcgctggtatgcgcgacgcaccgcaatttgcgcagcctgatagcgcagggccagttccgcgaagacctctactaccgcctgaacgggctggcgatctcgctgccacccctgcgtcaacgtagcgaccttgccgccctggttaaccatatcctctttcagtgttgcgggggcgagccgcactacagcgtgagcccagaagtgatgacgctcttcaagcggcatgcgtggcccggcaacctacgccaactacataacgttctcgatgcagcgcttgccatgctcgacgacggccatgtcattgagccccatcacctccccgaagacttcgtcatggaggtcgattcgggcctccgaccgatcgaggaagacggttcgacggcggcgcatcgcgcgcgacagccggcgtcgggaagcggtcctgccaaaaagttgcaagatctcgcgttggatgccatcgagcaggcgatcgagcaaaacgagggaaatatatcggtcgccgcacggcagttgggggtcagccggaccacgatctaccgcaagctgaggcaactttcaccaaccggttgtcaccgaccggcacattggagccagtcgcggatcggcacatagaggccagcgccggatcggcgtaatggagccacttcccctctgacggacgtctcgaccttgaccggtccatcgctaccctgctgcctttttgttcggcaggaggtaggcggtggcccgcaggagcatcgagccccccaacgacgtccgtcagagcccggttcgagtggcttctatatgccgatcatcggtggctctattgtggcggtcagtgacaccggtcgccttcacccccacagatagtaggtgctgcggctgctcatgctcctgtcgcggtagcgcgctgttacgcgaccgcccccggacctcggcggacagcgcggaagattggaaacagcccgagcgtgcgtgcctcgggctgcatccttgccacacccaaccggattcgtcggaccgctcgacattcgcgttcgctcccgcggcgccgcgggtgtaccgttgcgttacagatgtacccttctttaacgtgtaacacacgcctggagcggccaagagccccgcaccttgcggcgcgtcttccccaggggcccaccggttgcggccttttgctgcgaccgtccatgctggcacgacacttgctgaaagcgttagagcggaatcggtccgatggagcattcgaagccgctaccgacagcagaacacacaaaggaggaagtgatgggcacaccacagattagcgcattggcggttcagtctggtccttacctccaccacaaccacaatacgagtgagcggatgcagccaacagagactgtgtcgtccctgtgtccttactgtggggtgggctgtggcctagaggcagtgccccaaggcaagggaacctataaaattcgtggcgatcgccaacatccctcgtcccaaggcatggtctgtgtcaaaggggcaacgattttggaagccattgatcgcgatcgcttggcctatcccctttggcgagaacggttagatcatccctttacggtgatttcttgggatgaagctctaactcgtcttgtggaacgcatccaatgggtgcgccatgagcagggggccgatgccatttgtatgtacggttcggggcaatttcacaccgaggactactacgtcgcacaaaagctcatgaaggggtgcctcggtacgaacaattttgatgctaattctcggttgtgcatgtcctcggcagtctctgcctatatggctagcttcggtgctgacggccccccctgctgctatgacgatttggaggctaccgactgtgcttttctcattggtacgaataccgctgagtgccatcccattgtctttaaccgcttacgcaatcaccacaagcgggatcgccgtgtcaagctaattgtcgtcgatcctcggcgcacaccgaccgcagaagtggcggatctgcaccttgccatccgccccggcacggatattgatctgctccacggcattggctatctgctcttgcagtggggacacattgatgtggacttcattgagaagtgtactgagggctttgccgattatgtaaagctgctggcggcctataccccagaatgggtggcgcaacggtgtggcattcctgaaagtgatctagagcaggcggctcgctactgggggcatgctcaagcagtactctctctttggtcaatgggcatcaatcagtccgctgaaggtactgccaaagctcgctgtctcattaatttgcatctgctcacggggcagattggccgtccggggagtggtcctttttcccttacaggacaacccaacgcgatgggaggtcgcgaagccggggggttaagccatctgttgccgggctatcgccaagtcaccaatccccagcaccgccaagaagtggaggacttttggggacttcctcgcggtcaaatcagcgatcgccccggtcgcacggcatggcaaattatcgagggcttagaacagggagaagtgggtttgctgtggattgcagccaccaatcccgcggttagttttccccatttagaacgtaccaaggcggcctttctcaaatccccctttaccgtctatcaggatgcctactttcccactgaaacagcagcctatgcccatctgattttgcctgcagctcaatggagcgagaaaacaggtgtgatgaccaactctgaacgccgcgtcacccttgcccctgcttttcgagtgccccccggtcttgcccgctccgattgggaaatttttgctgaggtggggcgccgcttgggatatgggcatctcttctcctttgccgatgccgctgctgtctatgccgaatttgtgcagctcactgccggtcgcccctgcgatcaatcgggactgagccacgaacgtcttgcccgtttaggtgccctgcagtggccctgtcctgccagcatggatgacgaagaagcccgtaagcccaaacgcctctatactgactggcgatttcacacccccaatcaacgggcatatttttgccttgcccacagtcaaggggtggctgaacccaccgatcacatctataactttaccctgacaacaggtcgtctctacggccactggcacacccaaacccgtaccggtcgcattgccaaaattcaaaaaatgcaccccaatccctttgtggaaatgcatcccgaggatgccgcaaacttgcatctccaagatggggattgggtggaggtgcgatcgcgccgcggtcaagtgtgcctacctgtcacgctcaccaaggccattcgcccaggaacactctttgtacccatgcactggggctttctctttgccgatagcggtgaggtgaaccagctgacacatcctattgcctgtccagtctcaaagcagccagaactcaaggcctgtgctgtacaggtgttgcccctgaagctgcagcagacgtcctagtaaggctgagatcttcttcagtgcattgtagttgaatgaagggttaggggggaaatgcccccctattttttgtctagccatcctgccacgtttgacagggtagcaatttcgacacgatagggttctctcttctgccgtta

SEQ ID NO: 216 - DNA, 7006 bp, Artificial Sequence
  SEQ ID NO: 216 presents example 216 of a designer Synechococcus sp. strain PCC 7942 transcription factor and Tetracycline resistance-based alcohol-selection and Lipase DNA construct (7006 base pairs (bp))
agaaaatctggcaccacacctctaccacatagtccgccaagcgccgatcccggttgagcgccagggccacatcccggaccagatcctcgacgaatttcggattgtcataggcccgctcggtaacgaatttctcgtccggccgcttgagaagcccgtacacctcgcaggaggcgctctcttcggcgacggcgatcaattcctcgatcagcatgtcgccagccagcctcacctcgatgccgatatgggagcgctggttgtgggcgccgtagtcggagattcccttggagcaggggcacaggctcgtcgccggcaccaggacgcgcaaggaaaaggaatactccccggcatcggataccgagccctgccagcagacctcgtagtcgaggaggctccgcacacccgacaccggcgccgtcttgctcacgaaatagggaaagcgcatctcgatcgtgcccctcctcgcctccagcctgtccaacattgcgagggccagggctttgaacgccgcctgatccagcgggccggtctgctcctccatcagttcgacgaagcgggacatgagggttcccttgacgtgcgccgccaaaccgacggtgagcgacagggtggcaacggtcgccagccgctcggcgcccgaccggatggtggcagggtatctgaggcccttgaccccgaccgcatgtatgggtaggtcacggccatccagttgcgactggacgtccggcatcagagttgctctgtcaggggcattcatctcggtccttcctcgggaatggggtcgaacaaaacggagaactggccgcactagagtaaagtagataaaatcctttctcaatggttttatgtataaagccccagagccaccgaccgtgtcgatgcggagcgcgtcaggaggcgagtccaggacagtcggagagcgtgactacatccggtaatgaacgtgcgctaccacactttgatggctcaccccacagacacgctgcgtggcagaccgtgcaccagggcgtcgtgccggcgcactgcaactggattatgatatcgccatcgaccgccgccgacggcaacgcccggtagacgaacgtgtacgccgccggcgacggcatgaacgccaagcatcgtcctcaatcaggtacgagatccggagaacctgagtgcggagcgacgttctattttcgtattcagtaacaatttgtcgagaatcggtctgatccgcggcttcacgcacctgcccgaggggcttgcgcggaccttgaggtgaccttgagcgggcagataccaccaaaatttcccacgtgctattatggttttgctaaagctctcgacagcgaggagagactcgcgaagataagcaattcgcccgacagaggtgaatgaggagacggtatgtccaagatgcaagagttcgcgcggctggagacagtcgcgtcgatgcgcagagcggtctgggacggcaacgagtgtcagccggggaaagtggctgatgtcgttttgcgctcgtggacccggtgtcgtgctgaaggtgtcgttcccaatgcccgccaggagttcgacccgatcccgcgaacggcgcttgacgaaacggttgaggccaagcgggcgctgatccttgctgccgagccggtcgtcgacgcgttgatggagcagatgaacgacgcccccaggatgatcatcctgaacgacgaacggggcgtcgtgctgctgaaccagggaaacgacaccctccttgaagacgcccgccgccgggccgtgcgggtgggcgtctgctgggacgaacacgcccgaggcaccaatgccatgggaaccgcgctcgcggagaggaggcccgtagcgatccacggcgcagagcactacctcgagtcgaatacgattttcacctgcaccgcggcgccgatctacgatccgttcggcgagttcaccggaattctggatatcagcggatatgcgggggacatgggcccggttccgattccctttgttcagatggcggtgcaattcatcgagaatcagttgttccgccagacctttgccgattgcattctgctgcactttcatgtgcgccccgacttcgtcggaacgatgcgcgaagggatagccgtgctgtcgcgcgagggaaccatcgtctcgatgaaccgtgctgggctcaagatcgcagggctcaacctggaggccgtcgccgatcaccgtttcgattccgtcttcgacttgaatttcggggcctttctcgaccacgtgcggcagtccgccttcggtctcgtccgcgtctcgctctacggcggcgttcaggtctacgcccgagtggaaccgggcctgcgtgttccgccacgtccggccgcccacgcccgccctcctcggccggcaccgcggcctctggattcgctggacacgggcgacgcagcagtccgcctcgcgattgaccgcgcccgccgcgcgatcggccgcaacctcagcatcctcatccagggcgagacgggtgccggcaaggaagtgttcgccaagcatctgcatgccgagagcccgagaagcaaggggccgttcgttgccgtcaattgcgccgccatacccgagggtttgatcgagtccgagcttttcggatacgaagaaggggccttcactggcggacggcgcaaaggcaacatcggcaaggtcgcccaggcccacggcggcacgttgttcctcgacgagatcggagacatggcgccggggctgcagaccagactgctgcgggttctacaggaccgggcagtgatgcccctcggcggtcgcgaacctatgccggtcgacattgcgctggtatgcgcgacgcaccgcaatttgcgcagcctgatagcgcagggccagttccgcgaagacctctactaccgcctgaacgggctggcgatctcgctgccacccctgcgtcaacgtagcgaccttgccgccctggttaaccatatcctctttcagtgttgcgggggcgagccgcactacagcgtgagcccagaagtgatgacgctcttcaagcggcatgcgtggcccggcaacctacgccaactacataacgttctcgatgcagcgcttgccatgctcgacgacggccatgtcattgagccccatcacctccccgaagacttcgtcatggaggtcgattcgggcctccgaccgatcgaggaagacggttcgacggcggcgcatcgcgcgcgacagccggcgtcgggaagcggtcctgccaaaaagttgcaagatctcgcgttggatgccatcgagcaggcgatcgagcaaaacgagggaaatatatcggtcgccgcacggcagttgggggtcagccggaccacgatctaccgcaagctgaggcaactttcaccaaccggttgtcaccgaccggcacattggagccagtcgcggatcggcacatagaggccagcgccggatcggcgtaatggagccacttcccctctgacggacgtctcgaccttgaccggtccatcgctaccctgctgcctttttgttcggcaggaggtaggcggtggcccgcaggagcatcgagccccccaacgacgtccgtcagagcccggttcgagtggcttctatatgccgatcatcggtggctctattgtggcggtcagtgacaccggtcgccttcacccccacagatagtaggtgctgcggctgctcatgctcctgtcgcggtagcgcgctgttacgcgaccgcccccggacctcggcggacagcgcggaagattggaaacagcccgagcgtgcgtgcctcgggctgcatccttgccacacccaaccggattcgtcggaccgctcgacattcgcgttcgctcccgcggcgccgcgggtgtaccgttgcgttacagatgtacccttctttaacgtgtaacacacgcctggagcggccaagagccccgcaccttgcggcgcgtcttccccaggggcccaccggttgcggccttttgctgcgaccgtccatgctggcacgacacttgctgaaagcgttagagcggaatcggtccgatggagcattcgaagccgctaccgacagcagaacacacaaaggaggaagtgatgaaacccaacatacccctgatcgtaattctgagcactgtcgcgctcgacgctgtcggcatcggcctgattatgccggtgctgccgggcctcctgcgcgatctggttcactcgaacgacgtcaccgcccactatggcattctgctggcgctgtatgcgttggtgcaatttgcctgcgcacctgtgctgggcgcgctgtcggatcgtttcgggcggcggccaatcttgctcgtctcgctggccggcgccactgtcgactacgccatcatggcgacagcgcctttcctttgggttctctatatcgggcggatcgtggccggcatcaccggggcgactggggcggtagccggcgcttatattgccgatatcactgatggcgatgagcgcgcgcggcacttcggcttcatgagcgcctgtttcgggttcgggatggtcgcgggacctgtgctcggtgggctgatgggcggtttctccccccacgctccgttcttcgccgcggcagccttgaacggcctcaatttcctgacgggctgtttccttttgccggagtcgcacaaaggcgaacgccggccgttacgccgggaggctctcaacccgctcgcttcgttccggtgggcccggggcatgaccgtcgtcgccgccctgatggcggtcttcttcatcatgcaacttgtcggacaggtgccggccgcgctttgggtcattttcggcgaggatcgctttcactgggacgcgaccacgatcggcatttcgcttgccgcatttggcattctgcattcactcgcccaggcaatgatcaccggccctgtagccgcccggctcggcgaaaggcgggcactcatgctcggaatgattgccgacggcacaggctacatcctgcttgccttcgcgacacggggatggatggcgttcccgatcatggtcctgcttgcttcgggtggcatcggaatgccggcgctgcaagcaatgttgtccaggcaggtggatgaggaacgtcaggggcagctgcaaggctcactggcggcgctcaccagcctgacctcgatcgtcggacccctcctcttcacggcgatctatgcggcttctataacaacgtggaacgggtgggcatggattgcaggcgctgccctctacttgctctgcctgccggcgctgcgtcgcgggctttggagcggcgcagggcaacgagccgatcgctgaatgggtatctttgactataaaaacctcggcaccgagggctccaaaacgctgttcgccgatgccatcgcgatcacgctgtattcctaccacaacctggataacggctttgccgtgggttaccagcacaatggcctggggcttggcttgccggccacgctggtgggtgcgttgctgggcagcacggattcacaaggtgtgattcccggtattccctggaaccccgactcggaaaaagctgcgctggaagcggtgcaaaaagccggctggacgcccatcagcgccagtgacctgggctatggcggcaaggtcgatgggcgcggcactttctttggcgaaaaggccggctacaccacggcccaggtcgaggtgctgggcaagtacgatgacgccggcaaactgctcgaaatcggcatcggctttcgtggcacctcggggccacgggaaagcttgatcaccgactccatcggcgacgtgatcagcgacctgctggcggcctttggccccaaggattatgccaagaactacgcgggcgaagcctttggcggcttgctcaaaaatgtcgccgactatgccggcgcccatggcctgagcggcaaggacgtggtggtcagcggccacagcctgggcgggctggcggtcaacagcatggcggatttaagcaacaacaaatggtcggggttctacaaggacgccaactacgtggcctatgcctcaccgacccagagcgcgggcgataaagtgttgaacatcggctacgaaaacgacccggtgttccgcgcgcttgacggctcatccttcaacttgtcgtccctgggcgtgcacgacaaaccccacgagtcgaccaccgacaatatcgtcagcttcaacgaccactacgcctcgacgctgtggaatatcctgccgttttcgatcgtcaacctgccgacctgggtctcgcatttgcccaccggctatggcgacggcatgacgcgcatcctcgagtccggcttctacgaccagatgacccgcgactccacggtgatcgtcgccaacctgtccgacccggcgcgggccaccacctgggtgcaagacctcaaccgcaatgccgaaccccacaagagcaacaccttcatcatcggcagccacggcaatgacctgatccagggcggcaagggcgcagactttatcgaaggcggcaaaggcaatgacacgatccgcgacaacagtgggcataacaccttcctgttcagcggtaattttggcaatgatcgggtgatcggctaccaaaccacggacaagctggtgttccagaacgtggagggcagcaccgacctgcgcgaccatgccaaagtggtcggtgccgacacggtgctcacttttggcgccgactcggtgaccctggtcggcgttgggcatggcggcctgtgggcggacggggtcagcatcggctgataatagtgatcccggccgctactaaagcctgatttgtcttgatagctgctcctgcctttgggcaggggcttttttctgtctgccattcttgaggatggcggactctttcccttttgctctacgcccatgaatgcgatcgcagtctcccctgtccagcacgttggagtgattggtggtggccagttagcttggatgctggcaccagcagcgcaacagttggggatgtcgctgcacgttcaaacacccaatgatcacgacccagcagtagcgatcgcggatcaaaccgtattagcagcagttgctgacgcggttctctcttctgccgtta

SEQ ID NO: 217 - DNA, 5556 bp, Artificial Sequence
  SEQ ID NO:217 presents example 217 for a designer Prochlorococcus marinus MIT9313 transcription factor and glyphosate tolerant protein-based alcohol-selection DNA construct (5556 bp)
agaaaatctggcaccacacctctaccacatagtccgccaagcgccgatcccggttgagcgccagggccacatcccggaccagatcctcgacgaatttcggattgtcataggcccgctcggtaacgaatttctcgtccggccgcttgagaagcccgtacacctcgcaggaggcgctctcttcggcgacggcgatcaattcctcgatcagcatgtcgccagccagcctcacctcgatgccgatatgggagcgctggttgtgggcgccgtagtcggagattcccttggagcaggggcacaggctcgtcgccggcaccaggacgcgcaaggaaaaggaatactccccggcatcggataccgagccctgccagcagacctcgtagtcgaggaggctccgcacacccgacaccggcgccgtcttgctcacgaaatagggaaagcgcatctcgatcgtgcccctcctcgcctccagcctgtccaacattgcgagggccagggctttgaacgccgcctgatccagcgggccggtctgctcctccatcagttcgacgaagcgggacatgagggttcccttgacgtgcgccgccaaaccgacggtgagcgacagggtggcaacggtcgccagccgctcggcgcccgaccggatggtggcagggtatctgaggcccttgaccccgaccgcatgtatgggtaggtcacggccatccagttgcgactggacgtccggcatcagagttgctctgtcaggggcattcatctcggtccttcctcgggaatggggtcgaacaaaacggagaactggccgcactagagtaaagtagataaaatcctttctcaatggttttatgtataaagccccagagccaccgaccgtgtcgatgcggagcgcgtcaggaggcgagtccaggacagtcggagagcgtgactacatccggtaatgaacgtgcgctaccacactttgatggctcaccccacagacacgctgcgtggcagaccgtgcaccagggcgtcgtgccggcgcactgcaactggattatgatatcgccatcgaccgccgccgacggcaacgcccggtagacgaacgtgtacgccgccggcgacggcatgaacgccaagcatcgtcctcaatcaggtacgagatccggagaacctgagtgcggagcgacgttctattttcgtattcagtaacaatttgtcgagaatcggtctgatccgcggcttcacgcacctgcccgaggggcttgcgcggaccttgaggtgaccttgagcgggcagataccaccaaaatttcccacgtgctattatggttttgctaaagctctcgacagcgaggagagactcgcgaagataagcaattcgcccgacagaggtgaatgaggagacggtatgtccaagatgcaagagttcgcgcggctggagacagtcgcgtcgatgcgcagagcggtctgggacggcaacgagtgtcagccggggaaagtggctgatgtcgttttgcgctcgtggacccggtgtcgtgctgaaggtgtcgttcccaatgcccgccaggagttcgacccgatcccgcgaacggcgcttgacgaaacggttgaggccaagcgggcgctgatccttgctgccgagccggtcgtcgacgcgttgatggagcagatgaacgacgcccccaggatgatcatcctgaacgacgaacggggcgtcgtgctgctgaaccagggaaacgacaccctccttgaagacgcccgccgccgggccgtgcgggtgggcgtctgctgggacgaacacgcccgaggcaccaatgccatgggaaccgcgctcgcggagaggaggcccgtagcgatccacggcgcagagcactacctcgagtcgaatacgattttcacctgcaccgcggcgccgatctacgatccgttcggcgagttcaccggaattctggatatcagcggatatgcgggggacatgggcccggttccgattccctttgttcagatggcggtgcaattcatcgagaatcagttgttccgccagacctttgccgattgcattctgctgcactttcatgtgcgccccgacttcgtcggaacgatgcgcgaagggatagccgtgctgtcgcgcgagggaaccatcgtctcgatgaaccgtgctgggctcaagatcgcagggctcaacctggaggccgtcgccgatcaccgtttcgattccgtcttcgacttgaatttcggggcctttctcgaccacgtgcggcagtccgccttcggtctcgtccgcgtctcgctctacggcggcgttcaggtctacgcccgagtggaaccgggcctgcgtgttccgccacgtccggccgcccacgcccgccctcctcggccggcaccgcggcctctggattcgctggacacgggcgacgcagcagtccgcctcgcgattgaccgcgcccgccgcgcgatcggccgcaacctcagcatcctcatccagggcgagacgggtgccggcaaggaagtgttcgccaagcatctgcatgccgagagcccgagaagcaaggggccgttcgttgccgtcaattgcgccgccatacccgagggtttgatcgagtccgagcttttcggatacgaagaaggggccttcactggcggacggcgcaaaggcaacatcggcaaggtcgcccaggcccacggcggcacgttgttcctcgacgagatcggagacatggcgccggggctgcagaccagactgctgcgggttctacaggaccgggcagtgatgcccctcggcggtcgcgaacctatgccggtcgacattgcgctggtatgcgcgacgcaccgcaatttgcgcagcctgatagcgcagggccagttccgcgaagacctctactaccgcctgaacgggctggcgatctcgctgccacccctgcgtcaacgtagcgaccttgccgccctggttaaccatatcctctttcagtgttgcgggggcgagccgcactacagcgtgagcccagaagtgatgacgctcttcaagcggcatgcgtggcccggcaacctacgccaactacataacgttctcgatgcagcgcttgccatgctcgacgacggccatgtcattgagccccatcacctccccgaagacttcgtcatggaggtcgattcgggcctccgaccgatcgaggaagacggttcgacggcggcgcatcgcgcgcgacagccggcgtcgggaagcggtcctgccaaaaagttgcaagatctcgcgttggatgccatcgagcaggcgatcgagcaaaacgagggaaatatatcggtcgccgcacggcagttgggggtcagccggaccacgatctaccgcaagctgaggcaactttcaccaaccggttgtcaccgaccggcacattggagccagtcgcggatcggcacatagaggccagcgccggatcggcgtaatggagccacttcccctctgacggacgtctcgaccttgaccggtccatcgctaccctgctgcctttttgttcggcaggaggtaggcggtggcccgcaggagcatcgagccccccaacgacgtccgtcagagcccggttcgagtggcttctatatgccgatcatcggtggctctattgtggcggtcagtgacaccggtcgccttcacccccacagatagtaggtgctgcggctgctcatgctcctgtcgcggtagcgcgctgttacgcgaccgcccccggacctcggcggacagcgcggaagattggaaacagcccgagcgtgcgtgcctcgggctgcatccttgccacacccaaccggattcgtcggaccgctcgacattcgcgttcgctcccgcggcgccgcgggtgtaccgttgcgttacagatgtacccttctttaacgtgtaacacacgcctggagcggccaagagccccgcaccttgcggcgcgtcttccccaggggcccaccggttgcggccttttgctgcgaccgtccatgctggcacgacacttgctgaaagcgttagagcggaatcggtccgatggagcattcgaagccgctaccgacagcagaacacacaaaggaggaagtgatgcttcatggtgcttcctcaaggccagccactgcacgcaaatccagtgggctcagcggaaccgttcgtatacccggagataagagcatatctcacaggtccttcatgttcggtggcttggcatctggtgaaaccagaataactggcctattggagggtgaggacgtcataaacacaggtaaggcgatgcaagctatgggagccagaattcgcaaagagggagatacgtggatcattgacggggttggaaacggtgggctacttgccccagaggcaccacttgacttcggaaatgcagccaccggttgtcgtctgactatgggccttgttggcgtttacgacttcgactccacattcatcggagatgctagccttactaagcgtcctatgggacgcgttttgaaccctcttagggagatgggtgttcaggtcaagtcagaagatggcgatagactgccggtaactctcagaggtcccaaaacaccaacacccatcacatacagggtgccaatggctagtgcccaagtgaagagtgcagttttgttggcaggactgaacacaccggggataacgacagtcatcgaacctatcatgactagggatcacaccgaaaagatgcttcagggatttggcgccaatttgaccgtggagactgatgcagacggtgtcaggaccattaggcttgaaggcagaggtaagttgactggtcaagtgatcgatgtgccaggtgacccttcttctaccgcctttccactcgtcgctgctctcttggtacctggtagcgacgttaccatcctaaacgttctaatgaaccctaccagaactggccttattctgacccttcaggagatgggtgctgatattgaggtgattaaccctagattggctggaggggaagatgtggctgacctccgtgttcgctcaagtactcttaaaggcgtcactgttccggaagatagagcgcctagcatgattgatgagtatcccatccttgcagtagccgcagcatttgctgaaggcgcaaccgtgatgaacggccttgaagaactcagggttaaggagtctgataggcttagcgctgttgcaaacggtcttaagctgaatggcgtggattgcgacgaaggagagacatctctcgtcgtaaggggaaggcctgatggaaagggacttgggaatgcctcaggagcagcagtggctacacatctcgatcacaggattgccatgtcattcctcgttatgggcttggttagcgaaaatccagtgactgtggatgatgctaccatgattgctacgtcctttccagagttcatggacctcatggctgggttgggagcgaaaatcgagctcagcgacacaaaagcggcctaatgatttagtttcggtgtctatctcttaatagcctcgatttattttcggggctattaatcaactctcagaggcgacaagcttcttcttcccttacgacgtttttattggttggacatggcaaggttctctcttctgccgtta

SEQ ID NO: 218 - DNA, 6500 bp, Artificial Sequence
  SEQ ID NO:218 presents example 218 for a designer Cyanothece sp. ATCC 51142 transcription factor and nitrate reductase-based alcohol-selection DNA construct (6500 bp)
agaaaatctggcaccacacctctaccacatagtccgccaagcgccgatcccggttgagcgccagggccacatcccggaccagatcctcgacgaatttcggattgtcataggcccgctcggtaacgaatttctcgtccggccgcttgagaagcccgtacacctcgcaggaggcgctctcttcggcgacggcgatcaattcctcgatcagcatgtcgccagccagcctcacctcgatgccgatatgggagcgctggttgtgggcgccgtagtcggagattcccttggagcaggggcacaggctcgtcgccggcaccaggacgcgcaaggaaaaggaatactccccggcatcggataccgagccctgccagcagacctcgtagtcgaggaggctccgcacacccgacaccggcgccgtcttgctcacgaaatagggaaagcgcatctcgatcgtgcccctcctcgcctccagcctgtccaacattgcgagggccagggctttgaacgccgcctgatccagcgggccggtctgctcctccatcagttcgacgaagcgggacatgagggttcccttgacgtgcgccgccaaaccgacggtgagcgacagggtggcaacggtcgccagccgctcggcgcccgaccggatggtggcagggtatctgaggcccttgaccccgaccgcatgtatgggtaggtcacggccatccagttgcgactggacgtccggcatcagagttgctctgtcaggggcattcatctcggtccttcctcgggaatggggtcgaacaaaacggagaactggccgcactagagtaaagtagataaaatcctttctcaatggttttatgtataaagccccagagccaccgaccgtgtcgatgcggagcgcgtcaggaggcgagtccaggacagtcggagagcgtgactacatccggtaatgaacgtgcgctaccacactttgatggctcaccccacagacacgctgcgtggcagaccgtgcaccagggcgtcgtgccggcgcactgcaactggattatgatatcgccatcgaccgccgccgacggcaacgcccggtagacgaacgtgtacgccgccggcgacggcatgaacgccaagcatcgtcctcaatcaggtacgagatccggagaacctgagtgcggagcgacgttctattttcgtattcagtaacaatttgtcgagaatcggtctgatccgcggcttcacgcacctgcccgaggggcttgcgcggaccttgaggtgaccttgagcgggcagataccaccaaaatttcccacgtgctattatggttttgctaaagctctcgacagcgaggagagactcgcgaagataagcaattcgcccgacagaggtgaatgaggagacggtatgtccaagatgcaagagttcgcgcggctggagacagtcgcgtcgatgcgcagagcggtctgggacggcaacgagtgtcagccggggaaagtggctgatgtcgttttgcgctcgtggacccggtgtcgtgctgaaggtgtcgttcccaatgcccgccaggagttcgacccgatcccgcgaacggcgcttgacgaaacggttgaggccaagcgggcgctgatccttgctgccgagccggtcgtcgacgcgttgatggagcagatgaacgacgcccccaggatgatcatcctgaacgacgaacggggcgtcgtgctgctgaaccagggaaacgacaccctccttgaagacgcccgccgccgggccgtgcgggtgggcgtctgctgggacgaacacgcccgaggcaccaatgccatgggaaccgcgctcgcggagaggaggcccgtagcgatccacggcgcagagcactacctcgagtcgaatacgattttcacctgcaccgcggcgccgatctacgatccgttcggcgagttcaccggaattctggatatcagcggatatgcgggggacatgggcccggttccgattccctttgttcagatggcggtgcaattcatcgagaatcagttgttccgccagacctttgccgattgcattctgctgcactttcatgtgcgccccgacttcgtcggaacgatgcgcgaagggatagccgtgctgtcgcgcgagggaaccatcgtctcgatgaaccgtgctgggctcaagatcgcagggctcaacctggaggccgtcgccgatcaccgtttcgattccgtcttcgacttgaatttcggggcctttctcgaccacgtgcggcagtccgccttcggtctcgtccgcgtctcgctctacggcggcgttcaggtctacgcccgagtggaaccgggcctgcgtgttccgccacgtccggccgcccacgcccgccctcctcggccggcaccgcggcctctggattcgctggacacgggcgacgcagcagtccgcctcgcgattgaccgcgcccgccgcgcgatcggccgcaacctcagcatcctcatccagggcgagacgggtgccggcaaggaagtgttcgccaagcatctgcatgccgagagcccgagaagcaaggggccgttcgttgccgtcaattgcgccgccatacccgagggtttgatcgagtccgagcttttcggatacgaagaaggggccttcactggcggacggcgcaaaggcaacatcggcaaggtcgcccaggcccacggcggcacgttgttcctcgacgagatcggagacatggcgccggggctgcagaccagactgctgcgggttctacaggaccgggcagtgatgcccctcggcggtcgcgaacctatgccggtcgacattgcgctggtatgcgcgacgcaccgcaatttgcgcagcctgatagcgcagggccagttccgcgaagacctctactaccgcctgaacgggctggcgatctcgctgccacccctgcgtcaacgtagcgaccttgccgccctggttaaccatatcctctttcagtgttgcgggggcgagccgcactacagcgtgagcccagaagtgatgacgctcttcaagcggcatgcgtggcccggcaacctacgccaactacataacgttctcgatgcagcgcttgccatgctcgacgacggccatgtcattgagccccatcacctccccgaagacttcgtcatggaggtcgattcgggcctccgaccgatcgaggaagacggttcgacggcggcgcatcgcgcgcgacagccggcgtcgggaagcggtcctgccaaaaagttgcaagatctcgcgttggatgccatcgagcaggcgatcgagcaaaacgagggaaatatatcggtcgccgcacggcagttgggggtcagccggaccacgatctaccgcaagctgaggcaactttcaccaaccggttgtcaccgaccggcacattggagccagtcgcggatcggcacatagaggccagcgccggatcggcgtaatggagccacttcccctctgacggacgtctcgaccttgaccggtccatcgctaccctgctgcctttttgttcggcaggaggtaggcggtggcccgcaggagcatcgagccccccaacgacgtccgtcagagcccggttcgagtggcttctatatgccgatcatcggtggctctattgtggcggtcagtgacaccggtcgccttcacccccacagatagtaggtgctgcggctgctcatgctcctgtcgcggtagcgcgctgttacgcgaccgcccccggacctcggcggacagcgcggaagattggaaacagcccgagcgtgcgtgcctcgggctgcatccttgccacacccaaccggattcgtcggaccgctcgacattcgcgttcgctcccgcggcgccgcgggtgtaccgttgcgttacagatgtacccttctttaacgtgtaacacacgcctggagcggccaagagccccgcaccttgcggcgcgtcttccccaggggcccaccggttgcggccttttgctgcgaccgtccatgctggcacgacacttgctgaaagcgttagagcggaatcggtccgatggagcattcgaagccgctaccgacagcagaacacacaaaggaggaagtgatgaccaactctactaaaactctctgtccttattgtggtgtcggttgcggtttagaagtcttacccccggcccaacctggaaaaccggtaaaccgagatagtgaaggaacccccatctggcaagtgagaggcgatcgcaaccatccttctagtttagggaaagtctgtgttaaaggggcaacggttagtgagtcgttagaaaaatctcgtcttaaatatcccatgatgcgagacagtttaaccgatgagtttcgtcgagtgagttgggatgaagcgatggaagccattgttaaccgtatgcaaaccctacgcctaacccaaggaccagacgctttatgtatgtatggttctggacagtttcaaacagaagattattatattgctcaaaaactatttaaagggttcctgggaaccaataactttgacgcgaattctcgtctgtgtatgtcttctgcagtggcaggttatacccaaagtttcggcagtgatgggccaccctgttgttacgaagacttagagttaaccgactgtgcctttttaatagggacgaatacagcagaatgtcatcccatcgtctttaaccgtctacgagttcatcacaaaaagaaccgtaaagttaaaatggtggtagttgaccccagacgaacccaaaccgcagaagcagcggacttacacttagctattaaaccaggaaccgatatcgatctctttaacggtattgcctatttactcatgcgttggggtcgtatcgatacctttttcatcgatgaatgtacccaaaacttttcagcctatgctgatgttatccgtcattatcccccagaattggtagctcgtaactgtggtattcgtatcgatgagttagaaaaagcggcccaatattggggagactcagaacgggtgttatccttatggtctatggggatcaatcaatcttctgaaggaacagccaaagttcgcaccctgatcaacttacatttgatgacgggagatatcggtaaacctggggccggaccattctccctcaccggacaacccaatgccatgggcggccgagaagccggaggactttgtaatatcttacctgggtatcgagtcattaataaccctcaacatcgggccgaagttgaacagttttggaagcttcctcaaggaagtattcaaccgcaacggggccgtaccgcttgggaaatgattcaagggttagaaacgggagaggtaggctttttatggatcgcagccactaaccctgcggtgagtatgcccgatattaaacggactcaagcagccttaaagcgatcgcctttcaccgtttatcaagacgcttattatcctacagaaacctcagcctatgcccatattttactcccagcagcccaatggagtgaaaaaacaggggtcatgaccaactcagaacgaatggtgaccttatgtccccagtttcgtgatcccccaggggaagcaaggcccgactgggaggtatttgcagaagtgggacgacggttagggtttacagaggggtttaattttaaaacttccgccgaggtgtatgcagagtttgtgcagataactgaaggccgtccctgcgatagttcgggtttaagtcacgacaagttacgcacctatggccctctacaatggccctatcccgatgcttggccttggttagaaggagaggacttagagcaacaaaaccgcaccaataagcgactttataccgattttcgcttcaataccccagatggacgggctaggttcgcagcctaccattctaaagggctggctgaacccactgatgaagcttaccctttcgtgttaaccaccggaagattatacggccattggcacacccaaacccgcaccggacgcattcctaaaattcaaaagatgcaccccgatccctttatggaaattcatcctcaagatgctgcaaaattgaacattgaagagaatacgttcgttgaagtgcgatcgcgtcgaggaaaggctcgttttctggcaaaaatcactaaggcgatcgctcctgggactctgtttatccccatgcactggggcgcactttgggctgaggatgccgaagcgaacgctttaactcatcctaatgcctgtcctacttctttgcaaccagagttaaaagcttgtgcggtacaggtaaaggttgctactgaagaagaatgggttattacgagttcagagtccgaagttcagagttcggagttaagagttatctaataagctgttttagagaaatttgttcggtaaatattagcctacctacagttgttgtgggtaggctaatattatgaattgagtcctactgaaccaatgattatcgttacgactaaaagtaataaatgtcatcagcaggataggggttgataggaaaagttttttaatcggatggttttcgagttagaggttagggtttctttaggttctctcttctgccgtta

SEQ ID NO: 219 - DNA, 7187 bp, Artificial Sequence
  SEQ ID NO: 219 presents example 219 of a designer Anabaena PCC 7120 transcription factor and ketol-acid reductoisomerase/dihydroxy-acid dehydratase-based alcohol-selection DNA construct (7187 bp)
agaaaatctggcaccacacctctaccacatagtccgccaagcgccgatcccggttgagcgccagggccacatcccggaccagatcctcgacgaatttcggattgtcataggcccgctcggtaacgaatttctcgtccggccgcttgagaagcccgtacacctcgcaggaggcgctctcttcggcgacggcgatcaattcctcgatcagcatgtcgccagccagcctcacctcgatgccgatatgggagcgctggttgtgggcgccgtagtcggagattcccttggagcaggggcacaggctcgtcgccggcaccaggacgcgcaaggaaaaggaatactccccggcatcggataccgagccctgccagcagacctcgtagtcgaggaggctccgcacacccgacaccggcgccgtcttgctcacgaaatagggaaagcgcatctcgatcgtgcccctcctcgcctccagcctgtccaacattgcgagggccagggctttgaacgccgcctgatccagcgggccggtctgctcctccatcagttcgacgaagcgggacatgagggttcccttgacgtgcgccgccaaaccgacggtgagcgacagggtggcaacggtcgccagccgctcggcgcccgaccggatggtggcagggtatctgaggcccttgaccccgaccgcatgtatgggtaggtcacggccatccagttgcgactggacgtccggcatcagagttgctctgtcaggggcattcatctcggtccttcctcgggaatggggtcgaacaaaacggagaactggccgcactagagtaaagtagataaaatcctttctcaatggttttatgtataaagccccagagccaccgaccgtgtcgatgcggagcgcgtcaggaggcgagtccaggacagtcggagagcgtgactacatccggtaatgaacgtgcgctaccacactttgatggctcaccccacagacacgctgcgtggcagaccgtgcaccagggcgtcgtgccggcgcactgcaactggattatgatatcgccatcgaccgccgccgacggcaacgcccggtagacgaacgtgtacgccgccggcgacggcatgaacgccaagcatcgtcctcaatcaggtacgagatccggagaacctgagtgcggagcgacgttctattttcgtattcagtaacaatttgtcgagaatcggtctgatccgcggcttcacgcacctgcccgaggggcttgcgcggaccttgaggtgaccttgagcgggcagataccaccaaaatttcccacgtgctattatggttttgctaaagctctcgacagcgaggagagactcgcgaagataagcaattcgcccgacagaggtgaatgaggagacggtatgtccaagatgcaagagttcgcgcggctggagacagtcgcgtcgatgcgcagagcggtctgggacggcaacgagtgtcagccggggaaagtggctgatgtcgttttgcgctcgtggacccggtgtcgtgctgaaggtgtcgttcccaatgcccgccaggagttcgacccgatcccgcgaacggcgcttgacgaaacggttgaggccaagcgggcgctgatccttgctgccgagccggtcgtcgacgcgttgatggagcagatgaacgacgcccccaggatgatcatcctgaacgacgaacggggcgtcgtgctgctgaaccagggaaacgacaccctccttgaagacgcccgccgccgggccgtgcgggtgggcgtctgctgggacgaacacgcccgaggcaccaatgccatgggaaccgcgctcgcggagaggaggcccgtagcgatccacggcgcagagcactacctcgagtcgaatacgattttcacctgcaccgcggcgccgatctacgatccgttcggcgagttcaccggaattctggatatcagcggatatgcgggggacatgggcccggttccgattccctttgttcagatggcggtgcaattcatcgagaatcagttgttccgccagacctttgccgattgcattctgctgcactttcatgtgcgccccgacttcgtcggaacgatgcgcgaagggatagccgtgctgtcgcgcgagggaaccatcgtctcgatgaaccgtgctgggctcaagatcgcagggctcaacctggaggccgtcgccgatcaccgtttcgattccgtcttcgacttgaatttcggggcctttctcgaccacgtgcggcagtccgccttcggtctcgtccgcgtctcgctctacggcggcgttcaggtctacgcccgagtggaaccgggcctgcgtgttccgccacgtccggccgcccacgcccgccctcctcggccggcaccgcggcctctggattcgctggacacgggcgacgcagcagtccgcctcgcgattgaccgcgcccgccgcgcgatcggccgcaacctcagcatcctcatccagggcgagacgggtgccggcaaggaagtgttcgccaagcatctgcatgccgagagcccgagaagcaaggggccgttcgttgccgtcaattgcgccgccatacccgagggtttgatcgagtccgagcttttcggatacgaagaaggggccttcactggcggacggcgcaaaggcaacatcggcaaggtcgcccaggcccacggcggcacgttgttcctcgacgagatcggagacatggcgccggggctgcagaccagactgctgcgggttctacaggaccgggcagtgatgcccctcggcggtcgcgaacctatgccggtcgacattgcgctggtatgcgcgacgcaccgcaatttgcgcagcctgatagcgcagggccagttccgcgaagacctctactaccgcctgaacgggctggcgatctcgctgccacccctgcgtcaacgtagcgaccttgccgccctggttaaccatatcctctttcagtgttgcgggggcgagccgcactacagcgtgagcccagaagtgatgacgctcttcaagcggcatgcgtggcccggcaacctacgccaactacataacgttctcgatgcagcgcttgccatgctcgacgacggccatgtcattgagccccatcacctccccgaagacttcgtcatggaggtcgattcgggcctccgaccgatcgaggaagacggttcgacggcggcgcatcgcgcgcgacagccggcgtcgggaagcggtcctgccaaaaagttgcaagatctcgcgttggatgccatcgagcaggcgatcgagcaaaacgagggaaatatatcggtcgccgcacggcagttgggggtcagccggaccacgatctaccgcaagctgaggcaactttcaccaaccggttgtcaccgaccggcacattggagccagtcgcggatcggcacatagaggccagcgccggatcggcgtaatggagccacttcccctctgacggacgtctcgaccttgaccggtccatcgctaccctgctgcctttttgttcggcaggaggtaggcggtggcccgcaggagcatcgagccccccaacgacgtccgtcagagcccggttcgagtggcttctatatgccgatcatcggtggctctattgtggcggtcagtgacaccggtcgccttcacccccacagatagtaggtgctgcggctgctcatgctcctgtcgcggtagcgcgctgttacgcgaccgcccccggacctcggcggacagcgcggaagattggaaacagcccgagcgtgcgtgcctcgggctgcatccttgccacacccaaccggattcgtcggaccgctcgacattcgcgttcgctcccgcggcgccgcgggtgtaccgttgcgttacagatgtacccttctttaacgtgtaacacacgcctggagcggccaagagccccgcaccttgcggcgcgtcttccccaggggcccaccggttgcggccttttgctgcgaccgtccatgctggcacgacacttgctgaaagcgttagagcggaatcggtccgatggagcattcgaagccgctaccgacagcagaacacacaaaggaggaagtgatggcccggatgtactatgacgaagatgccaatttagaccttttggctggaaaaaccattgcaattatcggctatggttctcaaggtcatgcccacgctttaaatttaaaagatagtggtttgaatgtgattgtggggctatatccgggtagtaagtcagcagaaaaagcccaagcagctgggttaacagtgaaaaatgtggcggatgctgctaacattgctgacttcatcatgattttgttacccgatgaagtgcagaaaacagtttacaaaaacgaaatcgaaccaaatctgcaagaaggaaacactttagcttttgctcacgggtttaatattcactttgggcaagtcgtaccacctgcgaacgtagacgtagttatggtagcacccaaaggccctgggcatttggtacgacgcacttacgaacaaggtcaaggtgtaccagcgctgtttgccgtttatcaagatgctagtggaaaagcacgcgatcgcgccctatcttatgctaaaggtatcggtggcactcgtggcggtgttttggaaacaactttccgtgaagaaactgaaaccgatttattcggtgaacaagccgtattatgcggtggtttgagtgctttaattaaagctggttttgaaaccttggtagaagcaggttatcaaccagaactagcttattttgaatgtctacacgaagttaaattaattgttgacttggtagtagaaggcggtttagccaaaatgcgcgacagcatttctaacactgctgaatatggtgattacactcgcgggcctcggattgtcaacgaacaaaccaaagccgaaatgcggaaggttctcagcgaaattcaatcaggacaatttgcacgggaatttgtgttagaaaaccaatctggtaaacccggatttactgcaatgcgtcgtcaagaagctgaacacccaattgaagaagttggtaaagatttacgggcaatgtttagctggttgaagaaagtttaaatgtcggagaattttagaagcaaggctatcacacaaggggtacagcgatcgcctaacagagcaatgctgcgggctgttggttttcaggatgcagattttaccaaagccattgtaggtgttgccaatggttacagcacgattaccccgtgtaatatggggataaatcaactagcacaaagggcagaagctggtataaatactgctggagcaaagccgcaaatattcggtacaattacgattagtgatgggatttcgatgggaaccgaagggatgaaatattccctggtatcacgagaagtaatcgctgactccattgaaaccgtttgtaatgggcaaagtttagacggggtaattgccattggtggctgtgataagaatatgccaggggcaatgattgcgatcgcccggataaatatccctgctatctttgtttacggtggcacaattaaacccggacattacaacggtaaagatttaactgttgtcagttcttttgaggctgttggtgagtacagcgccggtaaaattgacgaaaatgaactgttagcagtagaacgcaatgcttgtcctggtgcaggttcctgcggtgggatgtacacagcaaataccatgtcctctgcttttgaagcactggggatgagtttgccctattcgtctacaatggcggcagaagatgacgaaaaagctgatagtacggaagaatcagccaaggtattggtagaggcgattcgtcatcaattattacccagacagattatcactcgtaagtccatagaaaacgccatatctgtaattatggctgtgggtggttctactaatgcggtgttacattttctagcgatcgcccgtgcggctggtgtagaactaaatctggacgactttgaaactattcgtggtcgtgtccccgttttgtgcgacttgaaaccaagcggtagatatgtggctacagacctgcacaaagctggtggtataccccaagtcatgaaaatgttactcgtgcatggtttactccacggcgactgtatgaccatcacaggtaaaaccattgccgaagttttagcagatatcccagaagaaccatcgcctaatcaagatgtaattcgtccttggaataaccccatgtatgcccaaggccacttggctatactcaaaggtaatttggcaacagaaggcgcagttgccaaaattactggtgtgaaaaatcctgtgattacagggccagccaaagtatttgaatcagaagaggattgtttagatgcaattttggcaggtaaaattaaagccggtgacgtgattgtcatccgctacgaaggccccaaaggcggccctgggatgcgagaaatgttagcccccacctcagctattatcggtgcaggtttaggcgactcagtgggactaattaccgatggacgcttctccggtggtacttacggtatggttgtgggacacgttgcaccagaagcagccgttggtggggcgatcgctctggtacaagaaggtgatagcatcacaattgatgcccacgcccgttctttgcagttgaacatatcagacgaagaattaacccgtcgtcgtgccaattggcaaccccgtcccccacgttacactacaggcatactggcaaaatacgccaagttggtagcttctagtagtgtgggtgctgtcaccgatttagacttattcaataaatagtgaagtaagtaggaagcagggagcaggggaaagaaaattgacaactgtacaagattaatcgcgtctctgagcaatgaccaaatacatctacctccacggttttcttccagccccctatctgcgaaagcacaagatattagcaagcgtttcgcccaaattcacatacagctaacaatccctgatctcaatgctggtgaattttctcagttaacaatcacgcgccaaattcaacaagttgccgcaattttccctgataattctgaaccaataacgctgataggttctagtttaggcggtttaactgctgcttatctaggacagcgatatttacaagtacaacgcttagttttattagcgccagtttggttttttatcccattggttgcccaaaatgggtgaagaagctgtcacaagttggcaacaaacgatataggttctctcttctgccgtta

SEQ ID NO: 220 - DNA, 5885 bp, Artificial Sequence
  SEQ ID NO: 220 presents example 220 of a designer Anabaena PCC 7120 transcription factor and argininosuccinate lyase-based alcohol-selection lipase DNA construct (5885 bp)
agaaaatctggcaccacacctctaccacatagtccgccaagcgccgatcccggttgagcgccagggccacatcccggaccagatcctcgacgaatttcggattgtcataggcccgctcggtaacgaatttctcgtccggccgcttgagaagcccgtacacctcgcaggaggcgctctcttcggcgacggcgatcaattcctcgatcagcatgtcgccagccagcctcacctcgatgccgatatgggagcgctggttgtgggcgccgtagtcggagattcccttggagcaggggcacaggctcgtcgccggcaccaggacgcgcaaggaaaaggaatactccccggcatcggataccgagccctgccagcagacctcgtagtcgaggaggctccgcacacccgacaccggcgccgtcttgctcacgaaatagggaaagcgcatctcgatcgtgcccctcctcgcctccagcctgtccaacattgcgagggccagggctttgaacgccgcctgatccagcgggccggtctgctcctccatcagttcgacgaagcgggacatgagggttcccttgacgtgcgccgccaaaccgacggtgagcgacagggtggcaacggtcgccagccgctcggcgcccgaccggatggtggcagggtatctgaggcccttgaccccgaccgcatgtatgggtaggtcacggccatccagttgcgactggacgtccggcatcagagttgctctgtcaggggcattcatctcggtccttcctcgggaatggggtcgaacaaaacggagaactggccgcactagagtaaagtagataaaatcctttctcaatggttttatgtataaagccccagagccaccgaccgtgtcgatgcggagcgcgtcaggaggcgagtccaggacagtcggagagcgtgactacatccggtaatgaacgtgcgctaccacactttgatggctcaccccacagacacgctgcgtggcagaccgtgcaccagggcgtcgtgccggcgcactgcaactggattatgatatcgccatcgaccgccgccgacggcaacgcccggtagacgaacgtgtacgccgccggcgacggcatgaacgccaagcatcgtcctcaatcaggtacgagatccggagaacctgagtgcggagcgacgttctattttcgtattcagtaacaatttgtcgagaatcggtctgatccgcggcttcacgcacctgcccgaggggcttgcgcggaccttgaggtgaccttgagcgggcagataccaccaaaatttcccacgtgctattatggttttgctaaagctctcgacagcgaggagagactcgcgaagataagcaattcgcccgacagaggtgaatgaggagacggtatgtccaagatgcaagagttcgcgcggctggagacagtcgcgtcgatgcgcagagcggtctgggacggcaacgagtgtcagccggggaaagtggctgatgtcgttttgcgctcgtggacccggtgtcgtgctgaaggtgtcgttcccaatgcccgccaggagttcgacccgatcccgcgaacggcgcttgacgaaacggttgaggccaagcgggcgctgatccttgctgccgagccggtcgtcgacgcgttgatggagcagatgaacgacgcccccaggatgatcatcctgaacgacgaacggggcgtcgtgctgctgaaccagggaaacgacaccctccttgaagacgcccgccgccgggccgtgcgggtgggcgtctgctgggacgaacacgcccgaggcaccaatgccatgggaaccgcgctcgcggagaggaggcccgtagcgatccacggcgcagagcactacctcgagtcgaatacgattttcacctgcaccgcggcgccgatctacgatccgttcggcgagttcaccggaattctggatatcagcggatatgcgggggacatgggcccggttccgattccctttgttcagatggcggtgcaattcatcgagaatcagttgttccgccagacctttgccgattgcattctgctgcactttcatgtgcgccccgacttcgtcggaacgatgcgcgaagggatagccgtgctgtcgcgcgagggaaccatcgtctcgatgaaccgtgctgggctcaagatcgcagggctcaacctggaggccgtcgccgatcaccgtttcgattccgtcttcgacttgaatttcggggcctttctcgaccacgtgcggcagtccgccttcggtctcgtccgcgtctcgctctacggcggcgttcaggtctacgcccgagtggaaccgggcctgcgtgttccgccacgtccggccgcccacgcccgccctcctcggccggcaccgcggcctctggattcgctggacacgggcgacgcagcagtccgcctcgcgattgaccgcgcccgccgcgcgatcggccgcaacctcagcatcctcatccagggcgagacgggtgccggcaaggaagtgttcgccaagcatctgcatgccgagagcccgagaagcaaggggccgttcgttgccgtcaattgcgccgccatacccgagggtttgatcgagtccgagcttttcggatacgaagaaggggccttcactggcggacggcgcaaaggcaacatcggcaaggtcgcccaggcccacggcggcacgttgttcctcgacgagatcggagacatggcgccggggctgcagaccagactgctgcgggttctacaggaccgggcagtgatgcccctcggcggtcgcgaacctatgccggtcgacattgcgctggtatgcgcgacgcaccgcaatttgcgcagcctgatagcgcagggccagttccgcgaagacctctactaccgcctgaacgggctggcgatctcgctgccacccctgcgtcaacgtagcgaccttgccgccctggttaaccatatcctctttcagtgttgcgggggcgagccgcactacagcgtgagcccagaagtgatgacgctcttcaagcggcatgcgtggcccggcaacctacgccaactacataacgttctcgatgcagcgcttgccatgctcgacgacggccatgtcattgagccccatcacctccccgaagacttcgtcatggaggtcgattcgggcctccgaccgatcgaggaagacggttcgacggcggcgcatcgcgcgcgacagccggcgtcgggaagcggtcctgccaaaaagttgcaagatctcgcgttggatgccatcgagcaggcgatcgagcaaaacgagggaaatatatcggtcgccgcacggcagttgggggtcagccggaccacgatctaccgcaagctgaggcaactttcaccaaccggttgtcaccgaccggcacattggagccagtcgcggatcggcacatagaggccagcgccggatcggcgtaatggagccacttcccctctgacggacgtctcgaccttgaccggtccatcgctaccctgctgcctttttgttcggcaggaggtaggcggtggcccgcaggagcatcgagccccccaacgacgtccgtcagagcccggttcgagtggcttctatatgccgatcatcggtggctctattgtggcggtcagtgacaccggtcgccttcacccccacagatagtaggtgctgcggctgctcatgctcctgtcgcggtagcgcgctgttacgcgaccgcccccggacctcggcggacagcgcggaagattggaaacagcccgagcgtgcgtgcctcgggctgcatccttgccacacccaaccggattcgtcggaccgctcgacattcgcgttcgctcccgcggcgccgcgggtgtaccgttgcgttacagatgtacccttctttaacgtgtaacacacgcctggagcggccaagagccccgcaccttgcggcgcgtcttccccaggggcccaccggttgcggccttttgctgcgaccgtccatgctggcacgacacttgctgaaagcgttagagcggaatcggtccgatggagcattcgaagccgctaccgacagcagaacacacaaaggaggaagtgatgaccgaaaaacaaacttggagtcagcgatttgaatctgctctacatccagcgatcgctctttttaatgccagtataagttttgacatagaattaatagaatacgaccttacaggctctcaagctcatgcccagatgttggcgcatacggggattatttcgccggcagaaggagaacaactagttgcaggtttagaacaaattcgtgaagaatatcgccagggcaaatttcaacctggtatcgatgcggaagatgtccactttgcagttgagcgacggttaacagaaattgttggagatgtaggtaagaaattacatactgcgcgatcgcgtaatgatcaagtcggtacggatacaagactttacctacgtgaccaaattttacaaatcaaaacccaattacgggaatttcaacgggtcttattagatatagctgaaaaaaacgtggaaactctaattcctggttacactcacctacaacgcgcccagcctgtgagtttagctcatcacttgttggcttacttccaaatggcacaacgggactgggaacgcttaggggatgtttatcgccgggtgaatatttcgcctttggggtgtggtgctttagctggtacgacttttcccattgaccgccactacacagccgaattgttgcagtttgagcgtatttacgagaatagcttggatggagtgagcgatcgcgattttgccattgaatttttgtgtgcggctagtctgattatggttcacctcagccgtctttctgaagaaattattctttgggcatcggaagaatttcgcttcgtcatcctcaaagatagttgtgcaacaggttccagcattatgccccaaaagaaaaaccccgacgtaccggaattagtcaggggaaaaactgggcgtgtatttggtcatctccaagcaatgttggtaatcatgaaaggattacccttggcatataacaaagacctgcaagaagacaaagaaggtttatttgacagcgttaacacagttaaggcttgtctggaagccatgacaatcttgctacaggaaggcttggaatttcggactcagcgcctagctgaagctgtcacacaagatttttctaacgctaccgatgtcgcagattatctagcagccaggggtgttcccttccgcgaagcttataatatcgtgggtaaagtcgttaaaaccagtattgctgctggcaaacttttaaaggatttaaccttagaagaatggcaacaaatacacccaaaatttgccgacgatatttatgaagccatctcccctcgtcaagttgtagctgcacgtaacagttacggtggtactggttttgcccaggtgagtaaagccgtcagcgcggcgcgtaaggaaattggagaatagtgaagtaagtaggaagcagggagcaggggaaagaaaattgacaactgtacaagattaatcgcgtctctgagcaatgaccaaatacatctacctccacggttttcttccagccccctatctgcgaaagcacaagatattagcaagcgtttcgcccaaattcacatacagctaacaatccctgatctcaatgctggtgaattttctcagttaacaatcacgcgccaaattcaacaagttgccgcaattttccctgataattctgaaccaataacgctgataggttctagtttaggcggtttaactgctgcttatctaggacagcgatatttacaagtacaacgcttagttttattagcgccagtttggttttttatcccattggttgcccaaaatgggtgaagaagctgtcacaagttggcaacaaacgatataggttctctcttctgccgtta

SEQ ID NO: 221 - DNA, 1479 bp, Artificial Sequence
  SEQ ID NO. 221 presents example 221 of a designer Chlamydomonas reinhardtii Nial-promoter-controlled cell surface ZYS1-like protein-polyamine DNA construct (1479 bp)
agaaaatctggcaccacaccatggtagggtgcgagtgaccccgcgcgacttggaagggttcaaacgaccccgccgtacgaacttttgtcggggggcgctcccggatggtagggtgcgagtgaccccgcgcgacttggaagggttcaaacgaccccgccgtacgaacttttgtcggggggcgctcccggatgctggaagccagcagcgtcccagcggagagcccgcagggttctgacgccatggagactgatgacatgtgctggatttgccttgatgacaccaaggaccgtgacgtactagtcagcccctgccgttgcccgcgcaaggtgcacccgcgctgcctggcgcggtggcagctgcagcaggccggcaggctggaggagaccaattgcaggttttgccagcacaacctggcggactggaaggccagcctgacgcccgagaacctcaagcccgacgtgcagcgcgtgcagcccatcatggtggtctacttcgagggccagatccaccgcatccccgtcaagcaggggccgggcggcctcaaggagttcacgcagcgcattcgcgacctgttccggctgcccgaggacgttgacatctcgctgacgtttggctgcaaggagccgcatgttggtcattttgccaacctgggtcaatctccttctgaaagcctatgcttttatggggatttttggtcaacaaggcggtatcaatgcctttctcggtttctttgggattgcacccatgcaaattctctttacggatttctcctttattttcgtagctagttacattgaaattccctttatgattctaccgattttcaatgtactagatgatttggatgaaaatattgtgaatgcaagtaaagatttgggagccaatgattggcagacctttaccaaggttatttttcccttatcgcttaatggggtacgctctggcgtccagtcggtctttattcctagtctcagcctctttatgctgacacgtttgattggtggtaaccgagttatcaccttagggacagctatcgaacagcacttcctcacgacacaaaactggggaatgggggcaaccattggtgttgttcttattgctgctatgattgcgacaatgtggttaacaaaggagagacgtcaaaaaaagaaaaagaaaaagaaaaagaaaaagaaaaagaaaaagaaaaagaaaaagaaaaagaaaaagaaaaagaaaaagaaaaagaaaaagtgataaatggaggcgctcgttgatctgagccttgccccctgacgaacggcggtggatggaagatactgctctcaagtgctgaagcggtagcttagctccccgtttcgtgctgatcagtctttttcaacacgtaaaaagcggaggagttttgcaattttgttggttgtaacgatcctccgttgattttggcctctttctccatgggcgggctgggcgtatttgaagcggttctctcttctgccgtta

SEQ ID NO: 222 - DNA, 2717 bp, Artificial Sequence
  SEQ ID NO. 222 presents example 222 of a designer Chlamydomonas reinhardtii  Nial-promoter-controlled cell surface ZYS1-like protein-polyamine-linked Lipase-polylysine DNA construct (2717 bp)
agaaaatctggcaccacaccatggtagggtgcgagtgaccccgcgcgacttggaagggttcaaacgaccccgccgtacgaacttttgtcggggggcgctcccggatggtagggtgcgagtgaccccgcgcgacttggaagggttcaaacgaccccgccgtacgaacttttgtcggggggcgctcccggatgggccatacacaccgtgcctccgcgtcggcggcggctgcagtgctgctggcgctgctgctagcagggtgctccgttgggacaaccgcagctgccgggcgtcgcgcgctcctgcagggccccgttgctgacgtgcctgctgccaacctcacgtccgaggttcctgctcctaacgcgactgttgctattgacgcctacaatgtcacgggcgctgctcagaaggtcgccgccaacaagaccgccgccatctccaccatcttcgcccccacggacgcggcctttgcggaacttgctgcttctctgggcctggcctcgccagtggacttgttcaacgccacgctgaacgcaacggccgccaacatcaccgccctgcacgtcatcccgggagtggccctgaccgccgccaacatcacggccgctggcagcatcaccgccacctccctgctgggatacaatatcactgtgacagcgctgccgaacggcacgatcaccgccacaattccgggcagcaacatcgttgccgacgtcatcacccctgatgtgcccttcaacgggagcattgtgcatgtgatcaacaaggtcctgctgccgccgctgaacgagactgtgggctgggctgtgcccattgccaacgccactgccgcgggcgtaatgttggtcattttgccaacctgggtcaatctccttctgaaagcctatgcttttatggggatttttggtcaacaaggcggtatcaatgcctttctcggtttctttgggattgcacccatgcaaattctctttacggatttctcctttattttcgtagctagttacattgaaattccctttatgattctaccgattttcaatgtactagatgatttggatgaaaatattgtgaatgcaagtaaagatttgggagccaatgattggcagacctttaccaaggttatttttcccttatcgcttaatggggtacgctctggcgtccagtcggtctttattcctagtctcagcctctttatgctgacacgtttgattggtggtaaccgagttatcaccttagggacagctatcgaacagcacttcctcacgacacaaaactggggaatgggggcaaccattggtgttgttcttattgctgctatgattgcgacaatgtggttaacaaaggagagacgtcaaatgaagctactctctctgaccggtgtggctggtgtgcttgcgacttgcgttgcagccactcctttggtgaagcgtctaccttccggttcggaccctgccttttcgcagcccaagtcggtgctcgatgcgggtctgacctgccagggtgcttcgccatcctcggtctccaaacccatccttctcgtccccggaaccggcaccacaggtccacagtcgttcgactcgaactggatccccctctcaacgcagttgggttacacaccctgctggatctcacccccgccgttcatgctcaacgacacccaggtcaacacggagtacatggtcaacgccatcaccgcgctctacgctggttcgggcaacaacaagcttcccgtgcttacctggtcccagggtggtctggttgcacagtggggtctgaccttcttccccagtatcaggtccaaggtcgatcgacttatggcctttgcgcccgactacaagggcaccgtcctcgccggccctctcgatgcactcgcggttagtgcaccctccgtatggcagcaaaccaccggttcggcactcaccaccgcactccgaaacgcaggtggtctgacccagatcgtgcccaccaccaacctctactcggcgaccgacgagatcgttcagcctcaggtgtccaactcgccactcgactcatcctacctcttcaacggaaagaacgtccaggcacaggccgtgtgtgggccgctgttcgtcatcgaccatgcaggctcgctcacctcgcagttctcctacgtcgtcggtcgatccgccctgcgctccaccacgggccaggctcgtagtgcagactatggcattacggactgcaaccctcttcccgccaatgatctgactcccgagcaaaaggtcgccgcggctgcgctcctggcgccggcagctgcagccatcgtggcgggtccaaagcagaactgcgagcccgacctcatgccctacgcccgcccctttgcagtaggcaaaaggacctgctccggcatcgtcacccccaaaaagaaaaagaaaaagaaaaagaaaaagaaaaagaaaaagaaaaagaaaaagaaaaagaaaaagaaaaagaaaaagaaaaagaaaaagtgataaatggaggcgctcgttgatctgagccttgccccctgacgaacggcggtggatggaagatactgctctcaagtgctgaagcggtagcttagctccccgtttcgtgctgatcagtctttttcaacacgtaaaaagcggaggagttttgcaattttgttggttgtaacgatcctccgttgattttggcctctttctccatgggcgggctgggcgtatttgaagcggttctctcttctgccgtta

SEQ ID NO: 223 - DNA, 3617 bp, Artificial Sequence
  SEQ ID NO. 223 presents example 223 of a designer Chlamydomonas reinhardtii Nial-promoter-controlled cell surface ZYS1-like protein-polyamine DNA construct (3617 bp)
agaaaatctggcaccacaccatggtagggtgcgagtgaccccgcgcgacttggaagggttcaaacgaccccgccgtacgaacttttgtcggggggcgctcccggatggtagggtgcgagtgaccccgcgcgacttggaagggttcaaacgaccccgccgtacgaacttttgtcggggggcgctcccggatgggccatacacaccgtgcctccgcgtcggcggcggctgcagtgctgctggcgctgctgctagcagggtgctccgttgggacaaccgcagctgccgggcgtcgcgcgctcctgcagggccccgttgctgacgtgcctgctgccaacctcacgtccgaggttcctgctcctaacgcgactgttgctattgacgcctacaatgtcacgggcgctgctcagaaggtcgccgccaacaagaccgccgccatctccaccatcttcgcccccacggacgcggcctttgcggaacttgctgcttctctgggcctggcctcgccagtggacttgttcaacgccacgctgaacgcaacggccgccaacatcaccgccctgcacgtcatcccgggagtggccctgaccgccgccaacatcacggccgctggcagcatcaccgccacctccctgctgggatacaatatcactgtgacagcgctgccgaacggcacgatcaccgccacaattccgggcagcaacatcgttgccgacgtcatcacccctgatgtgcccttcaacgggagcattgtgcatgtgatcaacaaggtcctgctgccgccgctgaacgagactgtgggctgggctgtgcccattgccaacgccactgccgcgggcgtaatgttggtcattttgccaacctgggtcaatctccttctgaaagcctatgcttttatggggatttttggtcaacaaggcggtatcaatgcctttctcggtttctttgggattgcacccatgcaaattctctttacggatttctcctttattttcgtagctagttacattgaaattccctttatgattctaccgattttcaatgtactagatgatttggatgaaaatattgtgaatgcaagtaaagatttgggagccaatgattggcagacctttaccaaggttatttttcccttatcgcttaatggggtacgctctggcgtccagtcggtctttattcctagtctcagcctctttatgctgacacgtttgattggtggtaaccgagttatcaccttagggacagctatcgaacagcacttcctcacgacacaaaactggggaatgggggcaaccattggtgttgttcttattgctgctatgattgcgacaatgtggttaacaaaggagagacgtcaaatggccaggacgatgcgttccagggtggtggcaggggcagtggcatgcgcgatgagcatcgcgccgttcgcggggacgaccgcggtgatgacgctcgcgacgacgcacgcggcaatggcggccaccgcgcccgccgctggctacgcggcgacgcgttacccgatcatcctcgtgcacgggctctcgggtaccgacaagtacgccggcgtgctcgagtattggtacggcatccaggaggacctgcaacagaacggtgcgaccgtctacgtcgcgaacctgtcgggtttccagagcgacgacggcccgaacgggcgcggcgaacagttgctcgcttacgtgaagacggtgctcgcggcgacgggggcgaccaaggtcaatctcgtcggtcacagccagggcggcctctcgtcgcgctatgttgctgccgtcgcgcccgatctcgttgcgtcggtgacgacgatcggcacgccgcatcgcggctccgaattcgccgacttcgtgcaggacgtgctcgcgtacgatccgaccgggctttcgtcatcggtgatcgccgcgttcgtcaatgtgttcgggatcctgacgagcagcagccacaacaccaaccaggacgcgctcgccgcactgcagacgctgaccaccgcacgggccgccacgtacaaccagaactatccgagcgcgggcctgggtgcgccgggcagttgccagaccggtgcgccgaccgaaaccgtcggcggcaacacgcacctgctgtattcgtgggccggcacggcgatccagccgacgctctccgtgttcggcgtcacgggcgcgacggacacgagcacccttccgctcgtcgatccggcgaacgtgctcgacctgtcgacgctcgcgctgttcggcaccggcacggtgatgatcaaccgcggctccgggcagaacgacgggctcgtgtcgaagtgcagtgcgctgtacggcaaggtgctgagcacgagctacaagtggaaccacctcgacgagatcaaccagctgctcggcgtgcgcggcgcgtatgcggaagatcccgtcgcggtgatccgcacgcatgcgaaccggctgaagctggcgggcgtgatgaattcaggaattaaagcatctttaggtcttaacagaagattaatattcctgcttccttacatttttatagccattcttttagtgtttttaccaattattttaataattgtgaactcagttattcatatagctgatccaacttttgattcgtttaaattggttaaggattcaaaaacctgaaccaaaatttgaagaagcttatttattggaatcatatctgctttattgtgtctagttataggattgccgtatgcatattttgtagctagaagcaaaaacaaaattatgccaatttatgctatgagtcttattttaagtccattagtaatatttactattgcaaaaatttatgcagtacgcggctttttcttaactattgtttcgaaagaaaacgatcttaatgcaatttgatttatgatttttggcttaacctacttaaacttgccatatatgataatgccactttattcagtctttagagatatgcccgaaaatattgttgaagcttctcatgacttaggtaacggaccaattagaacactatttagagtaattttgccatacagcagtaaagcaatattaagtggcctaggtattattttcttatctagtgctaccaactttgttataagtgataaattacttccagatggctcgcaacaccaattaattggtacagtaattaataattacaccaaccctgcaaaccaatatgaagtagcaattggcactacattagttattgtcgtatcagtcatatttataggtacattcgcattgataagcttcttgccaagagtattcaaaagaagaaagagagcaagatatgagaaaaagaaaaagaaaaagaaaaagaaaaagaaaaagaaaaagaaaaagaaaaagaaaaagaaaaagaaaaagaaaaagaaaaagaaaaagtaataaatggaggcgctcgttgatctgagccttgccccctgacgaacggcggtggatggaagatactgctctcaagtgctgaagcggtagcttagctccccgtttcgtgctgatcagtctttttcaacacgtaaaaagcggaggagttttgcaattttgttggttgtaacgatcctccgttgattttggcctctttctccatgggcgggctgggcgtatttgaagcggttctctcttctgccgtta

SEQ ID NO: 224 - DNA, 2687 bp, Artificial Sequence
  SEQ ID NO. 224 presents example 224 of a designer Chlamydomonas reinhardtii Nial-promoter-controlled cell surface ZYS1-like protein-polyamine DNA construct (2687 bp)
agaaaatctggcaccacaccatggtagggtgcgagtgaccccgcgcgacttggaagggttcaaacgaccccgccgtacgaacttttgtcggggggcgctcccggatggtagggtgcgagtgaccccgcgcgacttggaagggttcaaacgaccccgccgtacgaacttttgtcggggggcgctcccggatgggccatacacaccgtgcctccgcgtcggcggcggctgcagtgctgctggcgctgctgctagcagggtgctccgttgggacaaccgcagctgccgggcgtcgcgcgctcctgcagggccccgttgctgacgtgcctgctgccaacctcacgtccgaggttcctgctcctaacgcgactgttgctattgacgcctacaatgtcacgggcgctgctcagaaggtcgccgccaacaagaccgccgccatctccaccatcttcgcccccacggacgcggcctttgcggaacttgctgcttctctgggcctggcctcgccagtggacttgttcaacgccacgctgaacgcaacggccgccaacatcaccgccctgcacgtcatcccgggagtggccctgaccgccgccaacatcacggccgctggcagcatcaccgccacctccctgctgggatacaatatcactgtgacagcgctgccgaacggcacgatcaccgccacaattccgggcagcaacatcgttgccgacgtcatcacccctgatgtgcccttcaacgggagcattgtgcatgtgatcaacaaggtcctgctgccgccgctgaacgagactgtgggctgggctgtgcccattgccaacgccactgccgcgggcgtaatggccaggacgatgcgttccagggtggtggcaggggcagtggcatgcgcgatgagcatcgcgccgttcgcggggacgaccgcggtgatgacgctcgcgacgacgcacgcggcaatggcggccaccgcgcccgccgctggctacgcggcgacgcgttacccgatcatcctcgtgcacgggctctcgggtaccgacaagtacgccggcgtgctcgagtattggtacggcatccaggaggacctgcaacagaacggtgcgaccgtctacgtcgcgaacctgtcgggtttccagagcgacgacggcccgaacgggcgcggcgaacagttgctcgcttacgtgaagacggtgctcgcggcgacgggggcgaccaaggtcaatctcgtcggtcacagccagggcggcctctcgtcgcgctatgttgctgccgtcgcgcccgatctcgttgcgtcggtgacgacgatcggcacgccgcatcgcggctccgaattcgccgacttcgtgcaggacgtgctcgcgtacgatccgaccgggctttcgtcatcggtgatcgccgcgttcgtcaatgtgttcgggatcctgacgagcagcagccacaacaccaaccaggacgcgctcgccgcactgcagacgctgaccaccgcacgggccgccacgtacaaccagaactatccgagcgcgggcctgggtgcgccgggcagttgccagaccggtgcgccgaccgaaaccgtcggcggcaacacgcacctgctgtattcgtgggccggcacggcgatccagccgacgctctccgtgttcggcgtcacgggcgcgacggacacgagcacccttccgctcgtcgatccggcgaacgtgctcgacctgtcgacgctcgcgctgttcggcaccggcacggtgatgatcaaccgcggctccgggcagaacgacgggctcgtgtcgaagtgcagtgcgctgtacggcaaggtgctgagcacgagctacaagtggaaccacctcgacgagatcaaccagctgctcggcgtgcgcggcgcgtatgcggaagatcccgtcgcggtgatccgcacgcatgcgaaccggctgaagctggcgggcgtgatgaatgctgtatatttcttgcttgtcttatccgccgggttgttgctaacccaagcagatgatgcaaatgaggaaggtgctgaagatggtacacagggtggagaggagaagaaggagaaggagaagaagaagaagaagaagaagaaggagaagaaaaagaagaagaagaagaagaagaagaagaagaagaagaagaagaaggtggcgaagaagaaggaggcggcaaagaagaagaagtcgaaagagagaaagataaaggcgaaagagagaaaggtaaaggcgaaaaaactaaaggcgaaaaaggtagaggcgaaaaaggccaacgcgaaaaaggcaaagaagaaggcgaagaagaggtacctggaaaaaagaaaaagcctggaaagggtaaaaaaggtgaagaagacaaatatcgtagaaaaaaagaaaaagaaaaagaaaaagaaaaagaaaaagaaaaagaaaaagaaaaagaaaaagaaaaagaaaaagaaaaagaaaaagaaaaagtagtaaatggaggcgctcgttgatctgagccttgccccctgacgaacggcggtggatggaagatactgctctcaagtgctgaagcggtagcttagctccccgtttcgtgctgatcagtctttttcaacacgtaaaaagcggaggagttttgcaattttgttggttgtaacgatcctccgttgattttggcctctttctccatgggcgggctgggcgtatttgaagcggttctctcttctgccgtta

SEQ ID NO: 225 - DNA, 3205 bp, Artificial Sequence
  SEQ ID NO: 225 presents example 225 of a designer Synechocystis sp. strain PCC 6803 nirA-promoter-controlled Lipase DNA construct (3205 bp)
agaaaatctggcaccacaccctaaatgcgtaaactgcatatgccttggctgagtgtaatttacgttacaaattttaacgaaacgggaaccctatattgatctctacatgatgcctaacattgttgaaattgcggtgtctgacgagcgattctccaccttggtgaccgctgtcactgcggccaatttggttgacgtgttgcaaagccctgggccctttacggttttcgctcccacggatacggcctttgccaaactcccccccggtaccattaccaccctggtacaaaatattccccaattggctcggattttaacctaccacgtggttgccgggaagtttacccaagctgatttatgtcgcctatcaactgttgattcagtagagggctccccgatcgccatcgactgtacggaggggtttgaagtgaaaaatgccacggtaatcatccccgatatcgaagcggacaacggcattatccatgtgattgacaacgtgattttaatgggaatgagtaaaggagaagaacttttcactggagttgttccaattcttgttgaattagatggtgatgttaatgggcacaaattttctgtcagtggagagggtgaaggtgatgcaacatacggaaaacttacccttaaatttatttgcactactggaaaactacctgttccatggccaacacttgtcactactttcgcctatggtgttcaatgcttttcaagatacccagatcatatgaaacggcatgactttttcaagagtgccatgcccgaaggttatgtacaggaaagaactatatttttcaaagatgacgggaactacaagacacgtgctgaagtcaagtttgaaggtgatacccttgttaatagaatcgagttaaaaggtattgattttaaagaagatggaaacattcttggacacaaattggaatacaactataactcacacaatgtatacatcatggcagacaaacaaaagaatggaatcaaagttaacttcaaaattagacacaacattgaagatggaagcgttcaactagcagaccattatcaacaaaatactccaattggcgatggccctgtccttctaccagacaaccattacctgtccacacaatctgtcctttcgaaagaccccaacgaaaagagagaccacatggtccttcttgagtttgtaacagctgctgggattacacatggcatggatgaactatacaaaatggtttcattcatttccatttctcaaggtgttagtctttgtcttcttgtctcttccatgatgctcggttcatctgctgttcctgtttctggtaaatctggatcttccactaccgccgtctctgcatctgacaattctgccctccctcctctcatttccagccgttgtgctcctccttctaacaagggaagtaaaagcgatcttcaagctgaaccttactacatgcaaaagaatacagaatggtatgagtcccatggtggcaacctgacatccatcggaaagcgagatgacaatttggttggtggcatgactttggatttacctagcgatgctcctcctatcagcctctctggatctaccaacagcgcctctgatggtggtaaggttgctgctgctactactgctcaaattcaagagttcaccaagtatgctggtatcgctgccactgcctactgtcgttctgttgtccctggtaacaagtgggactgtgtccaatgtcaaaagtgggttcctgatggcaagatcatcactacctttacctccttgctttccgacacaaatggttacgtcttgagaagtgataaacaaaagaccatttatcttgttttccgtggtaccaactccttcagaagtgccatcactgatattgtcttcaacttttccgactacaagcctgtcaagggcgccaaggttcatgctggtttcctttcctcttatgagcaagttgtcaatgactatttccctgtcatccaagaacaactgaccgctaaccctacttacaaggtcatcgttaccggtcactcactcggtggtgcacaagctttgcttgccggtatggatctctaccaacgtgaaccaagattgtctcccaagaatttgagcatcttcactgttggtggtcctcgtgttggtaaccccacctttgcttactatgttgaatctaccggtattcctttccaacgtaccgttcacaagagagatatcgttcctcacgttcctcctcaatccttcggattccttcaccccggtgttgaatcttggatcaagtccggtacctccaacgttcaaatctgtacttctgaaattgaaaccaaggattgcagtaactctatcgttcctttcacctctctccttgatcacttgagttactttgatatcaacgaaggaagctgtttgatgactcagacaagtcatatggacaagacccaaggggtcatagatgttgaagcattgaagaaagaaattcgcgagcaaattttatccgaactgaaggaacaaaaacaagaacaaaagccagagagaccaaagagaaagttaagtgaaaaacaacttgctgcattagctgctggaagacagaagaacccacgtttgctggcgaagaaagctagagaagaagcaaaagcaaaggaagaacaaaaagcaaaggaagctgaagcaaagaaagctgaagcaaagaaagagaaaaagaaaaagaaaaagaaaaagaaaaagaaaaagaaaaagaaaaagaaaaagaaaaagaaaaagaaaaagaaaaagaaaaagaaaaagtaatagtaatgagttacagttttggcaattactaaaaaactgacttcaattcaatgttagcccgctcccgcgggttttttgttgctttttcacagtgactataggtaatcagcaacacaatacggccctgttctttggacagtttttgtataatgttgaccgcatcctgaccggattttttatctaagtggggaattgtcaattgtcaattaaagctaagttctactaatgttttagaaggcattgtcgattgaaaataagggttgaatggagaaaattttgagcctttgtcaaagataaaaatttatttcaacagttttttaactagccgaaccagagaatgacccagtggcgctgactttgctcccgagtttttgttagaaattaccctcaagaagtaatctaataataaggttctctcttctgccgtta

SEQ ID NO: 226 - DNA, 2062 bp, Artificial Sequence
  SEQ ID NO: 226 presents example 226 of a designer Thermosynechococcus elongatus  nirA-promoter-controlled cell surface-linked lipase (using butanol) DNA construct (2062 bp)
agaaaatctggcaccacacctgacccccatcgagagactccgaacgtggcaaatggagggaccagagttgttcagttcacaggtagataatgtcgcgggtcttgatagttagcaataaatacagtttcagaatatctgtaatacaaaaactgtatcgagacaagaaaaaagtagcaaaatttacaaatgttcatgattcatctggctaaattggatgttcaactgacccattgaagacaagggcaacaaccatggccattaccctctgcatgattgtgcgggatgaggcgacacgcttaccccagtgcctagccagtgttgccggcgttgttgatgaagcggtgattgtggatacggggtcgcaggatgaaacggtggcgatcgcccgcgattggggggcacgggtctatgaaattccttggcaagatgattttgccgctgcccgcaatgttgctctagggtatgtgaccactgagtgggtcttagttctcgatgctgatgaaaccctcacccctgcctttgctgctttgctgcctcaaatttgccagcacatgaggagctcccttgtgctgttcttcctctctgcgtggacggccttggcgcggcctgttcgacgagcggttccgcaagatctgctcgaccagtttgaactcttttcacaatattcggcggccgcatactgtgcggcaaacaatcatgctccagtgggctcagacgtaacgtgctcggagaatgtctgccctgaggtagatgcggcggacgcaacgtttctctattcttttgaagattctggattaggcgatgttaccggccttctcgctctcgacaacacgaataaactgatcgtcctctctttccgcggctctcgttcagtagagaactggatcgcgaacctcgccgccgacctgacagaaatatctgacatctgctccggctgcgaggggcatgtcggcttcgttacttcttggaggtctgtagccgacactataagggagcaggtgcagaatgccgtgaacgagcatcccgattaccgcgtggtctttaccggacatagcttgggaggcgcactggcaactattgccgcagcagctctgcgaggaaatggatacaatatcgacgtgttctcatatggcgcgccccgcgtcggtaacagggcatttgcagaattcctgaccgcacagacgggcggcaccctgtatcgcatcacccataccaatgatatcgtccctagactccctcctcgagactggggttacagccactctagcccggagtactgggtcacgtctggtaacgacgtcccagtgaccgcaaacgacatcaccgtcgtggagggcatcgattccaccgacgggaacaaccaggggaatatcccagacatcccttcgcatctatggtatttcggtcccatttcagagtgtgatatgactcagacaagtcatatggacaagacccaaggggtcatagatgttgaagcattgaagaaagaaattcgcgagcaaattttatccgaactgaaggaacaaaaacaagaacaaaagccagagagaccaaagagaaagttaagtgaaaaacaacttgctgcattagctgctggaagacagaagaacccacgtttgctggcgaagaaagctagagaagaagcaaaagcaaaggaagaacaaaaagcaaaggaagctgaagcaaagaaagctgaagcaaagaaagagatgatgattcggaggctactgtcgccgaatcggattcgttttaaatatgtcttacagtatcactactccatctcagttcgtgttcttgtcatcagcgtgggccgacccaatagagttaataaaaagaaaaagaaaaagaaaaagaaaaagaaaaagaaaaagaaaaagaaaaagaaaaagaaaaagaaaaagaaaaagaaaaagaaaaagtaataaggctgagatcttcttcagtgcattgtagttgaatgaagggttaggggggaaatgcccccctattttttgtctagccatcctgccacgtttgacagggtagcaatttcgacacgatagggttctctcttctgccgtta

SEQ ID NO: 227 - DNA, 2053 bp, Artificial Sequence
  SEQ ID NO: 227 presents example 227 of a designer Arthrospira platensis cell surface-linked Lipase-polylysine DNA construct (2053 bp)
agaaaatctggcaccacaccatgactttgatggctaaacggcttttgatcctgttagttaccctaggtggtacagcatttttggcagcttgtggcgaacctactgccaccgaaacccaaggcgaacccaccgaacaaattgccgaaaccagtgaaccagtaaccgctgaaaccgtttctgatgaaactatcgaagcccaagcagaacccgctggggaagaaatggctgctgtagttgactcagaccccacagaaaccattgtcggtattgctagtggcgagagccaattcagcactctggtagcggctttagaaaccgccgaattagccgaaatcctttctggggaaggacctttcaccgtttttgctcccactgacgaagcatttgcggctctaccagaaggcacagttgaagaacttctcaaacccgaaaatcgtgatcaactggttcaaattcttacctatcacgttgtcccctcccaagttctgtctgctaacatcagtgatgggtctgttgaaaccgttgccggaatgcccttaactattactgttatggacggtactgtaatggtgaatgaagccagtgtcattcaagctgacattttaggcagcaatggggttattcatgccgttgacacggtaattttacctggtgtggtcgaaatgaggagctcccttgtgctgttcttcctctctgcgtggacggccttggcgcggcctgttcgacgagcggttccgcaagatctgctcgaccagtttgaactcttttcacaatattcggcggccgcatactgtgcggcaaacaatcatgctccagtgggctcagacgtaacgtgctcggagaatgtctgccctgaggtagatgcggcggacgcaacgtttctctattcttttgaagattctggattaggcgatgttaccggccttctcgctctcgacaacacgaataaactgatcgtcctctctttccgcggctctcgttcagtagagaactggatcgcgaacctcgccgccgacctgacagaaatatctgacatctgctccggctgcgaggggcatgtcggcttcgttacttcttggaggtctgtagccgacactataagggagcaggtgcagaatgccgtgaacgagcatcccgattaccgcgtggtctttaccggacatagcttgggaggcgcactggcaactattgccgcagcagctctgcgaggaaatggatacaatatcgacgtgttctcatatggcgcgccccgcgtcggtaacagggcatttgcagaattcctgaccgcacagacgggcggcaccctgtatcgcatcacccataccaatgatatcgtccctagactccctcctcgagactggggttacagccactctagcccggagtactgggtcacgtctggtaacgacgtcccagtgaccgcaaacgacatcaccgtcgtggagggcatcgattccaccgacgggaacaaccaggggaatatcccagacatcccttcgcatctatggtatttcggtcccatttcagagtgtgatatgactcagacaagtcatatggacaagacccaaggggtcatagatgttgaagcattgaagaaagaaattcgcgagcaaattttatccgaactgaaggaacaaaaacaagaacaaaagccagagagaccaaagagaaagttaagtgaaaaacaacttgctgcattagctgctggaagacagaagaacccacgtttgctggcgaagaaagctagagaagaagcaaaagcaaaggaagaacaaaaagcaaaggaagctgaagcaaagaaagctgaagcaaagaaagagatgatgattcggaggctactgtcgccgaatcggattcgttttaaatatgtcttacagtatcactactccatctcagttcgtgttcttgtcatcagcgtgggccgacccaatagagttaataaaaagaaaaagaaaaagaaaaagaaaaagaaaaagaaaaagaaaaagaaaaagaaaaagaaaaagaaaaagaaaaagaaaaagaaaaagtaaggttctctcttctgccgtta

SEQ ID NO: 228 - DNA, 2971 bp, Artificial Sequence
  SEQ ID NO: 228 presents example 228 of a designer Arthrospira platensis cell surface-linked Lipase-GFP-polylysine DNA construct (2971 bp)
agaaaatctggcaccacaccatggcggatattgtagatatagcagtgagtgcggggtgtttcaccaccttggtggcagccgtacaggcagcgggattagtggaaaccctgaaaactcccggtccttttaccgtttttgcgccccatgatgatgcttttgcgaaactcccccccggaactgttcagaccttagtgcagaacccaccccagttagcgaggattttaacatatcatgtggctgctggcaagttcctgaaggcagacctagaaaaactggattatttaacttcggtggaaggtgcgcctatttctctgaattttaccgagggatttgaggttaaaaatgccacagttatcaaccccgatattgaagcagacaatggggtgattcatgtgattgatacagtcattttaatggggatgacgttggaaaaaggtattgcttcgctggttgaggagtttattgctgcggggcggccatcagcacgagaacagagtattgatgaccggagaaacggctatctcgccagcgccgttctcgctggggcaacggaaacgcgtgtacaggttgaagacatcacgctcgatggcatgaccttgcgcgtcgtctcgccgccaaaaagcaacggcttgctacccaccattgtgtattaccacggcggctgttttgtgagcggcgactttgccacccatgacaaccaattgcgccagcttgcctggttcagtgggtgccgggtgatcgccgtgcagtaccgtctggcgccggagtacacttttccggcggcgcacgatgatgcggaacgaggcgccaacattatctatcggtatgcgcagcggcttggcgttgacgccgcgcgcatcacgctggccggcgacagcgccggcggccacctcgccctggtcacagcgctacgcctgaaagcggcgggagtatggcaacctgcgcagcttatcctgatttaccctatgctcgacgctaccgccagcatggcaagctacgccagcaacggcgaggattacatcattacccgggatacgctgcttagcggctacgaaatgtatttagcggccacacccgctacccatccggaagccagtccgctgtggcgcgaagattttaacgggctgccgccggttcatatcctgacggccgaatttgatcctttgcgcgatgagggagaagcgctgtaccggcggttaatagcacaagggatagaaagcacctgccagcgctatctgggcgtcattcacggtttctttcagttaggcgggataagcctcgcggcaaagcaggcgatgcgcgatatcgcctggcgtacgatgtctaaaggtgaagaattattcactggtgttgtcccaattttggttgaattagatggtgatgttaatggtcacaaattttctgtctccggtgaaggtgaaggtgatgctacttacggtaaattgaccttaaaatttatttgtactactggtaaattgccggttccatggccaaccttagtcactactttcggttatggtgttcaatgttttgctagatacccagatcatatgaaacaacatgactttttcaagtctgccatgccagaaggttatgttcaagaaagaactatttttttcaaagatgacggtaactacaagaccagagctgaagtcaagtttgaaggtgataccttagttaatagaatcgaattaaaaggtattgattttaaagaagatggtaacattttaggtcacaaattggaatacaactataactctcacaatgtttacatcatggctgacaaacaaaagaatggtatcaaagttaacttcaaaattagacacaacattgaagatggttctgttcaattagctgaccattatcaacaaaatactccaattggtgatggtccagtcttgttaccagacaaccattacttatccactcaatctgccttatccaaagatccaaacgaaaagagagaccacatggtcttgttagaatttgttactgctgctggtattacccatggtatggatgaattgtacaaaatgaatgctgtatatttcttgcttgtcttatccgccgggttgttgctaacccaagcagatgatgcaaatgaggaaggtgctgaagatggtacacagggtggagaggagaagaaggagaaggagaagaagaagaagaagaagaagaaggagaagaaaaagaagaagaagaagaagaagaagaagaagaagaagaagaagaaggtggcgaagaagaaggaggcggcaaagaagaagaagtcgaaagagagaaagataaaggcgaaagagagaaaggtaaaggcgaaaaaactaaaggcgaaaaaggtagaggcgaaaaaggccaacgcgaaaaaggcaaagaagaaggcgaagaagaggtacctggaaaaaagaaaaagcctggaaagggtaaaaaaggtgaagaagacaaatatcgtagaaatgactcagacaagtcatatggacaagacccaaggggtcatagatgttgaagcattgaagaaagaaattcgcgagcaaattttatccgaactgaaggaacaaaaacaagaacaaaagccagagagaccaaagagaaagttaagtgaaaaacaacttgctgcattagctgctggaagacagaagaacccacgtttgctggcgaagaaagctagagaagaagcaaaagcaaaggaagaacaaaaagcaaaggaagctgaagcaaagaaagctgaagcaaagaaagagatgatgattcggaggctactgtcgccgaatcggattcgttttaaatatgtcttacagtatcactactccatctcagttcgtgttcttgtcatcagcgtgggccgacccaatagagttaataaaaagaaaaagaaaaagaaaaagaaaaagaaaaagaaaaagaaaaagaaaaagaaaaagaaaaagaaaaagaaaaagaaaaagaaaaagtaaggttctctcttctgccgtta

SEQ ID NO: 229 - DNA, 2524 bp, Artificial Sequence
  SEQ ID NO: 229 presents example 229 of a designer Phaeodactylum tricornutum cell surface-linked Lipase-polylysine DNA construct (2524 bp)
agaaaatctggcaccacaccatgaaggggctttcatctgttgtcgtcttcaaatacttgacgatcttcatagtggtcgccagcgctcgtcgcttggaggatggcggttcgaattttgccggcgaatttctttctgatgcggaagtatgcgaaatgcaagaggaagcatggccgagtcagctgggggaatggttcggagcgcagcattcgtgcgaatgcaatggtgcttccgatgaagaaggcgttgacgtcgtcgagacgaaatgtaaagcaaccgagcaattttgttgccctgatacaggccgatgccacgaagcccgtcgagagcactacaacatgaaagccaaagacgtcaaccggactaccgatcaagggggtgactggttttggacatccggagtggaagcaaatatgtactgctacacatacttgggtgacgatctaccaaacggacgggtagagatttgcgaagacaccgattttgatcccgacgcgcctggaaacgagtggagctgcgacatgatcaacaatggcgaaaaatgtcaagagtgttcccagtgtgaagatgacgacgctaccaccaactttgattgttccaatattgccggcatagatgacattcctgccgatatctttcccaaaactggaatctgctatcgcttcaatggagcggagtgtgcttccgcctttatcaccaagcccttatcggtgcaagcgacaaatggcggagattccggcagtacgaacgccgttctgtcaggtctgtgttttgttattgcgattttgatggtttttggtaaggacgttatgacgttggaaaaaggtattgcttcgctggttgaggagtttattgctgcggggcggccatcagcacgagaacagagtattgatgaccggagaaacggctatctcgccagcgccgttctcgctggggcaacggaaacgcgtgtacaggttgaagacatcacgctcgatggcatgaccttgcgcgtcgtctcgccgccaaaaagcaacggcttgctacccaccattgtgtattaccacggcggctgttttgtgagcggcgactttgccacccatgacaaccaattgcgccagcttgcctggttcagtgggtgccgggtgatcgccgtgcagtaccgtctggcgccggagtacacttttccggcggcgcacgatgatgcggaacgaggcgccaacattatctatcggtatgcgcagcggcttggcgttgacgccgcgcgcatcacgctggccggcgacagcgccggcggccacctcgccctggtcacagcgctacgcctgaaagcggcgggagtatggcaacctgcgcagcttatcctgatttaccctatgctcgacgctaccgccagcatggcaagctacgccagcaacggcgaggattacatcattacccgggatacgctgcttagcggctacgaaatgtatttagcggccacacccgctacccatccggaagccagtccgctgtggcgcgaagattttaacgggctgccgccggttcatatcctgacggccgaatttgatcctttgcgcgatgagggagaagcgctgtaccggcggttaatagcacaagggatagaaagcacctgccagcgctatctgggcgtcattcacggtttctttcagttaggcgggataagcctcgcggcaaagcaggcgatgcgcgatatcgcctggcgtacgatgaatgctgtatatttcttgcttgtcttatccgccgggttgttgctaacccaagcagatgatgcaaatgaggaaggtgctgaagatggtacacagggtggagaggagaagaaggagaaggagaagaagaagaagaagaagaagaaggagaagaaaaagaagaagaagaagaagaagaagaagaagaagaagaagaagaaggtggcgaagaagaaggaggcggcaaagaagaagaagtcgaaagagagaaagataaaggcgaaagagagaaaggtaaaggcgaaaaaactaaaggcgaaaaaggtagaggcgaaaaaggccaacgcgaaaaaggcaaagaagaaggcgaagaagaggtacctggaaaaaagaaaaagcctggaaagggtaaaaaaggtgaagaagacaaatatcgtagaaatgactcagacaagtcatatggacaagacccaaggggtcatagatgttgaagcattgaagaaagaaattcgcgagcaaattttatccgaactgaaggaacaaaaacaagaacaaaagccagagagaccaaagagaaagttaagtgaaaaacaacttgctgcattagctgctggaagacagaagaacccacgtttgctggcgaagaaagctagagaagaagcaaaagcaaaggaagaacaaaaagcaaaggaagctgaagcaaagaaagctgaagcaaagaaagagaaaaagaaaaagaaaaagaaaaagaaaaagaaaaagaaaaagaaaaagaaaaagaaaaagaaaaagaaaaagaaaaagaaaaagaaaaagtaaggttctctcttctgccgtta

SEQ ID NO: 230 - DNA, 2317 bp, Artificial Sequence
  SEQ ID NO: 230 presents example 230 of a designer Microcoleus vaginatu cell surface-linked Lipase-polylysine DNA construct (2317 bp)
agaaaatctggcaccacaccatgagcaaattttacaattctcaaggatggcgcgatcgggtggcggtgctagcgggaatttttggcctcagcagtctcttgattttacccgtcttagcgcaatctaaccgcgaatcccagagcacttttcagccctcttccgtacttgactccccccagcgatcgggcggcaacattgcagatactctcaagagagaaagcgaattccaaactcttgcttctgtgttggctgctgctggtttgacggatctgctcagacaagaaggtcgtcctttaacaattttcgctcctaccaatcaagcttttcgtaaaaatgccgctgtttacaatcagctactccagccgcaaaacaaggagaaattagcgagagttttgaaatatcatttaattgctggccgtgtcactcctgaagatgtgaataaaggggaaattaaaacagttgaaggcggcacagtgaaaattcgcgtggcacctgatggagtgattatgaatgataatgttaaaggagttcaaccgtctattgaggctaaaaacggggtaattgtgcgggtagataatttacttttacccccggatttaatgacgttggaaaaaggtattgcttcgctggttgaggagtttattgctgcggggcggccatcagcacgagaacagagtattgatgaccggagaaacggctatctcgccagcgccgttctcgctggggcaacggaaacgcgtgtacaggttgaagacatcacgctcgatggcatgaccttgcgcgtcgtctcgccgccaaaaagcaacggcttgctacccaccattgtgtattaccacggcggctgttttgtgagcggcgactttgccacccatgacaaccaattgcgccagcttgcctggttcagtgggtgccgggtgatcgccgtgcagtaccgtctggcgccggagtacacttttccggcggcgcacgatgatgcggaacgaggcgccaacattatctatcggtatgcgcagcggcttggcgttgacgccgcgcgcatcacgctggccggcgacagcgccggcggccacctcgccctggtcacagcgctacgcctgaaagcggcgggagtatggcaacctgcgcagcttatcctgatttaccctatgctcgacgctaccgccagcatggcaagctacgccagcaacggcgaggattacatcattacccgggatacgctgcttagcggctacgaaatgtatttagcggccacacccgctacccatccggaagccagtccgctgtggcgcgaagattttaacgggctgccgccggttcatatcctgacggccgaatttgatcctttgcgcgatgagggagaagcgctgtaccggcggttaatagcacaagggatagaaagcacctgccagcgctatctgggcgtcattcacggtttctttcagttaggcgggataagcctcgcggcaaagcaggcgatgcgcgatatcgcctggcgtacgatgaatgctgtatatttcttgcttgtcttatccgccgggttgttgctaacccaagcagatgatgcaaatgaggaaggtgctgaagatggtacacagggtggagaggagaagaaggagaaggagaagaagaagaagaagaagaagaaggagaagaaaaagaagaagaagaagaagaagaagaagaagaagaagaagaagaaggtggcgaagaagaaggaggcggcaaagaagaagaagtcgaaagagagaaagataaaggcgaaagagagaaaggtaaaggcgaaaaaactaaaggcgaaaaaggtagaggcgaaaaaggccaacgcgaaaaaggcaaagaagaaggcgaagaagaggtacctggaaaaaagaaaaagcctggaaagggtaaaaaaggtgaagaagacaaatatcgtagaaatgactcagacaagtcatatggacaagacccaaggggtcatagatgttgaagcattgaagaaagaaattcgcgagcaaattttatccgaactgaaggaacaaaaacaagaacaaaagccagagagaccaaagagaaagttaagtgaaaaacaacttgctgcattagctgctggaagacagaagaacccacgtttgctggcgaagaaagctagagaagaagcaaaagcaaaggaagaacaaaaagcaaaggaagctgaagcaaagaaagctgaagcaaagaaagagaaaaagaaaaagaaaaagaaaaagaaaaagaaaaagaaaaagaaaaagaaaaagaaaaagaaaaagaaaaagaaaaagaaaaagaaaaagtaaggttctctcttctgccgtta

SEQ ID NO: 231 - DNA, 4552 bp, Artificial Sequence
  SEQ ID NO: 231 presents example 231 of a designer Methanosarcina barkeri cell surface-linked Lipase-polylysine DNA construct (4552 bp)
agaaaatctggcaccacaccatgaaagataggggaaaattgcattcagtacctttagtgttaatggcattatttttcgtatttttggtttcaaactcagctgtaacgttagctgcccaggaaattaagctctcagaggatattggactaaatggagagacttctatttacggtgataaagtggtgtggtcatattgggacaaaattcatctttatgacctaaaaaccggaaatgatactataattaccatgcctgaacattatgtatcacatcctgctatatatgataataaaattgtatactgtctttataatgtaaatgagaatccagttagggtcagactttacgtgtatgatatacttaattctacaagttcactaatcacagagaatttgtcccattgtgttcctgatatttacggtgatagaattgtgtgggctgcggaacgcgactacaagaccgatgtctacatgtacaatatttccactcatacacaaactcagataaccacaagaggatctgcaagtaacccttcaatatatgaaaacaaaatagtatgggtgggttacggggacaatggaactattatagataaaaataacaattccattagcagagatagtatttgcatttatgacctttccactaagaaggaaactatgatcaacactatcggaagagcatatgctcccgtgatctacagtgataggatagtatggaaggatagtcgcaattcagactttactgggagaagaggggatgtctacatgtataacctctcaactgagaaagaaagccggatctcttacagcggacagtcctcgttaggttcgtctccagctatctatggggacaggatagtatgggatgataatcgcaatggaaaatgggatatttacatgtacaatctctcaactaagaaggagactcagattaccaccagtggaagtgcaatgggacctgatatctacggagacaggatagtgtatagtgataatcgtcaaagattgacccctggtcctggtgatgtttatttttgtgatatctatgtgtatgatctcactgctagacccatagaaccacaagctgggtttacatccaatgtgacttccggaatagcacctctaacggtattattcactgataccagcactggtggagtaccaacttcctggcattgggacactggtgacggtatttactcaaaacatgccatgaatgcaacccatacgtttacaaacccaggggtgtataacgttactttaacagttacaaatgaagcaggcaatagcacggtaacgaaaccgaattatattactgtaactcccccacaaccaccagtggcagatttttatgctaatgtaacctctggaaaagcacctctaatggtgtctttccatggtagaattattggcaaagctacaagtaaaggcgaagaacctatttcctggtattgggattttggcgatggcatttattcaaaacacaccacgaatgcaatccacacatttcacaccacgaatgcaatccacacatttacaaaaccagggatttacacagtaaatcttactgtaggaaatttcgtgggtaatagtacagcgacaaagccagattacatagttgttatcgatccaaaagctcccgatgcaaattttagtagtaacattatcgagggttatgttcccctgacggtacagtttaatgacacttctcaaaatgcaacgtcaagggtatgggacttcgacaataatggaaaaacagactcaaccgatgtaaaccctgtttatacatttacaacaccaggaatccatactgttaacctgacagtaagaaatgcttacggcactacctcaaaaactgatacgataattgtacttacagaaaatgagatccggattacaaccagcgaattagcatcccatcctgatatctatggtaatagaatagtatggcaagaccttcgcaacggaaactacgatatctacatgtacgatctctccacttccagggaaaccaggatcactgctaatgaatcaaatcagacatatccttcactctactgtgatagaatagtgtggcaagatgatcgtaatggacagtatgatatctatatgtacaatatatctacttcaaaagaaactcaaataagcactagcgggcgcgctcagagacctaaaatctatggtgacaggataatgtggatggattatcgaactagaaataaaggtatttacgtgcacgacctatccacttctaaggaaactcggataatttcaaaaggaatacctcaatatattaatatgcaaggtaacttgatagtctggcatgatcttcgatacataagtccggatatttacatgtacgatctctccacttcaaaggaaactcaaataacctccaacggagaagcaacattccctaacgtctatggtaacaggatagtgtggaaagagtggcacagagaagatgtcaccaccgatatctacatgtacgatttatccacttccaagaagactcagattactaccaataaatcaagtcaatactatcctgctatttatggtaataagatagtatgggaagatttccgcaacgaatacatcaatatttacatgtacgatctctcaactcagaaggagactcagattaccaccagcggaggtgcacacgatcctgatatctatggagacaggattgtatataggaagtatagttatcatagatcacccgttgatcatgttttttttagtgatatctatatgtatgatctcactgctagacccatggaaccacaaactggacttacatccaatgtgactctagaacaacacctcatgacgttggaaaaaggtattgcttcgctggttgaggagtttattgctgcggggcggccatcagcacgagaacagagtattgatgaccggagaaacggctatctcgccagcgccgttctcgctggggcaacggaaacgcgtgtacaggttgaagacatcacgctcgatggcatgaccttgcgcgtcgtctcgccgccaaaaagcaacggcttgctacccaccattgtgtattaccacggcggctgttttgtgagcggcgactttgccacccatgacaaccaattgcgccagcttgcctggttcagtgggtgccgggtgatcgccgtgcagtaccgtctggcgccggagtacacttttccggcggcgcacgatgatgcggaacgaggcgccaacattatctatcggtatgcgcagcggcttggcgttgacgccgcgcgcatcacgctggccggcgacagcgccggcggccacctcgccctggtcacagcgctacgcctgaaagcggcgggagtatggcaacctgcgcagcttatcctgatttaccctatgctcgacgctaccgccagcatggcaagctacgccagcaacggcgaggattacatcattacccgggatacgctgcttagcggctacgaaatgtatttagcggccacacccgctacccatccggaagccagtccgctgtggcgcgaagattttaacgggctgccgccggttcatatcctgacggccgaatttgatcctttgcgcgatgagggagaagcgctgtaccggcggttaatagcacaagggatagaaagcacctgccagcgctatctgggcgtcattcacggtttctttcagttaggcgggataagcctcgcggcaaagcaggcgatgcgcgatatcgcctggcgtacgatgaatgctgtatatttcttgcttgtcttatccgccgggttgttgctaacccaagcagatgatgcaaatgaggaaggtgctgaagatggtacacagggtggagaggagaagaaggagaaggagaagaagaagaagaagaagaagaaggagaagaaaaagaagaagaagaagaagaagaagaagaagaagaagaagaagaaggtggcgaagaagaaggaggcggcaaagaagaagaagtcgaaagagagaaagataaaggcgaaagagagaaaggtaaaggcgaaaaaactaaaggcgaaaaaggtagaggcgaaaaaggccaacgcgaaaaaggcaaagaagaaggcgaagaagaggtacctggaaaaaagaaaaagcctggaaagggtaaaaaaggtgaagaagacaaatatcgtagaaatgactcagacaagtcatatggacaagacccaaggggtcatagatgttgaagcattgaagaaagaaattcgcgagcaaattttatccgaactgaaggaacaaaaacaagaacaaaagccagagagaccaaagagaaagttaagtgaaaaacaacttgctgcattagctgctggaagacagaagaacccacgtttgctggcgaagaaagctagagaagaagcaaaagcaaaggaagaacaaaaagcaaaggaagctgaagcaaagaaagctgaagcaaagaaagagaaaaagaaaaagaaaaagaaaaagaaaaagaaaaagaaaaagaaaaagaaaaagaaaaagaaaaagaaaaagaaaaagaaaaagaaaaagtaaggttctctcttctgccgttg

SEQ ID NO: 232 - DNA, 2533 bp, Artificial Sequence
  SEQ ID NO: 232 presents example 232 of a designer Synechococcus sp. strain PCC 7942 nirA-promoter-controlled cell surface-linked Lipase-polylysine DNA construct (2533 base pairs (bp))
agaaaatctggcaccacacccttcttgcagaacatgcatgatttacaaaaagttgtagtttctgttaccaattgcgaatcgagaactgcctaatctgccgagtatatgatggccaaaatccttgaggttgcccgcgaggcgggttgttttcagacgctactcacagccgttgaagtcgctggcttagtcgatgcactcaatagcgacggtccttttaccgtctttgcacctaccgatgatgcttttgctgcactaccaccgggcacagtgacaacgctggttcagaacccgccgcaactagctcgaattctcaagtttcacgttacggcaggtgctctatccaaagcagacctgatcgatcgcccgtcagttgattcgttagaaggcgcaccaattcccattggacgagcagagccgtttgaaatcaaaaatgcgacagttttgtctgctgatattgcctgtgataacggcattgttcatgtcttgaatcgcgtcattttaatgggcatgacgttggaaaaaggtattgcttcgctggttgaggagtttattgctgcggggcggccatcagcacgagaacagagtattgatgaccggagaaacggctatctcgccagcgccgttctcgctggggcaacggaaacgcgtgtacaggttgaagacatcacgctcgatggcatgaccttgcgcgtcgtctcgccgccaaaaagcaacggcttgctacccaccattgtgtattaccacggcggctgttttgtgagcggcgactttgccacccatgacaaccaattgcgccagcttgcctggttcagtgggtgccgggtgatcgccgtgcagtaccgtctggcgccggagtacacttttccggcggcgcacgatgatgcggaacgaggcgccaacattatctatcggtatgcgcagcggcttggcgttgacgccgcgcgcatcacgctggccggcgacagcgccggcggccacctcgccctggtcacagcgctacgcctgaaagcggcgggagtatggcaacctgcgcagcttatcctgatttaccctatgctcgacgctaccgccagcatggcaagctacgccagcaacggcgaggattacatcattacccgggatacgctgcttagcggctacgaaatgtatttagcggccacacccgctacccatccggaagccagtccgctgtggcgcgaagattttaacgggctgccgccggttcatatcctgacggccgaatttgatcctttgcgcgatgagggagaagcgctgtaccggcggttaatagcacaagggatagaaagcacctgccagcgctatctgggcgtcattcacggtttctttcagttaggcgggataagcctcgcggcaaagcaggcgatgcgcgatatcgcctggcgtacgatgaatgctgtatatttcttgcttgtcttatccgccgggttgttgctaacccaagcagatgatgcaaatgaggaaggtgctgaagatggtacacagggtggagaggagaagaaggagaaggagaagaagaagaagaagaagaagaaggagaagaaaaagaagaagaagaagaagaagaagaagaagaagaagaagaagaaggtggcgaagaagaaggaggcggcaaagaagaagaagtcgaaagagagaaagataaaggcgaaagagagaaaggtaaaggcgaaaaaactaaaggcgaaaaaggtagaggcgaaaaaggccaacgcgaaaaaggcaaagaagaaggcgaagaagaggtacctggaaaaaagaaaaagcctggaaagggtaaaaaaggtgaagaagacaaatatcgtagaaatgactcagacaagtcatatggacaagacccaaggggtcatagatgttgaagcattgaagaaagaaattcgcgagcaaattttatccgaactgaaggaacaaaaacaagaacaaaagccagagagaccaaagagaaagttaagtgaaaaacaacttgctgcattagctgctggaagacagaagaacccacgtttgctggcgaagaaagctagagaagaagcaaaagcaaaggaagaacaaaaagcaaaggaagctgaagcaaagaaagctgaagcaaagaaagagaaaaagaaaaagaaaaagaaaaagaaaaagaaaaagaaaaagaaaaagaaaaagaaaaagaaaaagaaaaagaaaaagaaaaagaaaaagtaataatagtgatcccggccgctactaaagcctgatttgtcttgatagctgctcctgcctttgggcaggggcttttttctgtctgccattcttgaggatggcggactctttcccttttgctctacgcccatgaatgcgatcgcagtctcccctgtccagcacgttggagtgattggtggtggccagttagcttggatgctggcaccagcagcgcaacagttggggatgtcgctgcacgttcaaacacccaatgatcacgacccagcagtagcgatcgcggatcaaaccgtattagcagcagttgctgacgcggttctctcttctgccgtta
